United States Patent Application Publication US 2022/0211063 A1 - sequence listing, part 51

SEQ ID NO: 152 - DNA, 7752678 bp, Penicillium roqueforti (residues 5,814,511-7,752,678 of 7,752,678)
  misc_feature (471)..(2988): n is a, c, g, or t
  misc_feature (125068)..(125241): n is a, c, g, or t
  misc_feature (177028)..(177803): n is a, c, g, or t
  misc_feature (384131)..(384321): n is a, c, g, or t
  misc_feature (555862)..(555887): n is a, c, g, or t
  misc_feature (601276)..(601376): n is a, c, g, or t
  misc_feature (676767)..(677111): n is a, c, g, or t
  misc_feature (719510)..(719709): n is a, c, g, or t
  misc_feature (1142758)..(1142975): n is a, c, g, or t
  misc_feature (1186306)..(1186928): n is a, c, g, or t
  misc_feature (1335789)..(1335960): n is a, c, g, or t
  misc_feature (1623890)..(1624078): n is a, c, g, or t
  misc_feature (1638029)..(1638196): n is a, c, g, or t
  misc_feature (1653209)..(1653330): n is a, c, g, or t
  misc_feature (1825533)..(1825713): n is a, c, g, or t
  misc_feature (2226335)..(2226483): n is a, c, g, or t
  misc_feature (2393326)..(2393492): n is a, c, g, or t
  misc_feature (2448029)..(2448167): n is a, c, g, or t
  misc_feature (2535304)..(2535417): n is a, c, g, or t
  misc_feature (2536977)..(2537199): n is a, c, g, or t
  misc_feature (2854122)..(2854160): n is a, c, g, or t
  misc_feature (2984525)..(2984774): n is a, c, g, or t
  misc_feature (3020827)..(3020986): n is a, c, g, or t
  misc_feature (3033663)..(3034040): n is a, c, g, or t
  misc_feature (3159256)..(3159377): n is a, c, g, or t
  misc_feature (3215490)..(3215755): n is a, c, g, or t
  misc_feature (3224550)..(3224852): n is a, c, g, or t
  misc_feature (3317434)..(3317714): n is a, c, g, or t
  misc_feature (3542082)..(3542257): n is a, c, g, or t
  misc_feature (3623089)..(3671588): n is a, c, g, or t
  misc_feature (3674128)..(3676164): n is a, c, g, or t
  misc_feature (3690938)..(3691172): n is a, c, g, or t
  misc_feature (3731683)..(3731941): n is a, c, g, or t
  misc_feature (3989065)..(3989240): n is a, c, g, or t
  misc_feature (3992024)..(3992135): n is a, c, g, or t
  misc_feature (4101379)..(4101816): n is a, c, g, or t
  misc_feature (4338959)..(4339088): n is a, c, g, or t
  misc_feature (4339466)..(4339770): n is a, c, g, or t
  misc_feature (4384133)..(4384295): n is a, c, g, or t
  misc_feature (4533774)..(4534000): n is a, c, g, or t
  misc_feature (4697051)..(4697221): n is a, c, g, or t
  misc_feature (4793842)..(4796557): n is a, c, g, or t
  misc_feature (4802159)..(4802531): n is a, c, g, or t
  misc_feature (5082424)..(5082567): n is a, c, g, or t
  misc_feature (5096606)..(5096762): n is a, c, g, or t
  misc_feature (5239354)..(5239492): n is a, c, g, or t
  misc_feature (5277707)..(5277891): n is a, c, g, or t
  misc_feature (5381105)..(5381304): n is a, c, g, or t
  misc_feature (5479285)..(5479716): n is a, c, g, or t
  misc_feature (5512271)..(5512467): n is a, c, g, or t
  misc_feature (5631202)..(5631289): n is a, c, g, or t
  misc_feature (5721684)..(5721908): n is a, c, g, or t
  misc_feature (5728801)..(5728946): n is a, c, g, or t
  misc_feature (5773994)..(5774083): n is a, c, g, or t
  misc_feature (5808460)..(5808504): n is a, c, g, or t
  misc_feature (5832936)..(5833053): n is a, c, g, or t
  misc_feature (5846493)..(5846684): n is a, c, g, or t
  misc_feature (5859621)..(5864342): n is a, c, g, or t
  misc_feature (5865323)..(5948322): n is a, c, g, or t
  misc_feature (5948903)..(5949337): n is a, c, g, or t
  misc_feature (6008391)..(6008479): n is a, c, g, or t
  misc_feature (6324361)..(6325082): n is a, c, g, or t
  misc_feature (6373211)..(6373571): n is a, c, g, or t
  misc_feature (6805550)..(6805552): n is a, c, g, or t
  misc_feature (6846983)..(6847998): n is a, c, g, or t
  misc_feature (6999682)..(6999814): n is a, c, g, or t
  misc_feature (7043444)..(7047251): n is a, c, g, or t
  misc_feature (7056989)..(7057494): n is a, c, g, or t
  misc_feature (7108394)..(7109165): n is a, c, g, or t
  misc_feature (7114302)..(7114990): n is a, c, g, or t
  misc_feature (7152080)..(7152275): n is a, c, g, or t
  misc_feature (7347407)..(7347513): n is a, c, g, or t
  misc_feature (7355670)..(7355674): n is a, c, g, or t
  misc_feature (7379152)..(7379426): n is a, c, g, or t
  misc_feature (7441573)..(7441798): n is a, c, g, or t
  misc_feature (7524923)..(7525042): n is a, c, g, or t
  misc_feature (7750535)..(7752448): n is a, c, g, or t
ttggtcgtctaggctggtacggctggagcccatcgccgaaggaggatagagcctcccagcccgagagcggggtttggatgaccatcgtgcagctccatggcttgaattggcggaacgaccacgaggaaagatatcagaaccactcttgctaattgtgctagggctcctgcgaagagtgttgctagaggggcccaaaaagttgttggaagacatgcgagatacttcacgttctggttgggcaccgaacaaaggcagtttttgcttttggatcgatgtgtagaattccttgagtactgcttcaacctgttgctcccaggctctcactgttccggtgaatggcgtattaaccaaaggcccaacatcatttgcaccgccgtctctgtcaaacaagccgtgggtgacctctgaagggaaagttgcagagcgtgccgacgtaggggcagagtgcgcttcatgggattgagccttggaccggttgactggacgcaacgtctcaaatccctccggtgcggcatccattgcgactcggtgtatagtgggcatggtatttcgaacgaattgagatttggtcatttttgaatcgatgtcagccatatgcagatcagtgtttagtagcaaaatagaatagcaaatggtatggacaacgtcagtagctttgaagccatgactcgggttgcaatcacaccatctggtggaaaaggcatccagcactcgatccacttgttgagtttctcccttgagcaccaaacggtcgcaaagagcccgaagagaggccacaatgttgagattagaccaattgtacagtcgcatgtatgcttcacggaccattgcccgatcagggtcacccagccaagcggcagcagactcgttgcctaccatctggtcctggctgtcgaagagcctctgtgcttgttctcgatctgtagctgtgggtccatcttcaatagcttcgccaggtccatctgcctgatcttcggtgtcatcagactgagagtcttcctgttcaatgagtggggtgttcgcagcggtctgataattcgatgctgttgatatagaatcaacaggagattcgcaaaccctgtcctcggacggaagcgccaatctagcgacattgatttgaggaattgcgacctgtgatttgatgctgcgcgagaaattttccacaacgggggacagggtactagaggcagtaacactctgagacttttcctgcaaagccaagtctgtgaagacttcgccagttgaagatcgatccttctctgtaagaggcgagatgtcctgaccacgagaggcagttgagggctgcagagaagtcttcggtttgggagctccaggagctgaaacactttctcttttcttctgcgcctgcaaaaatgccggttgtcgaattttagcctcccagtccgcattttctttccggtctgattcctcgtcgagataaggattcatgatctgccgcaggctactcacagggcttggagccgccatattatccatagtctgtggtgcaagatgttgaggaataacaattgggggaggagcatggtcaggtaccgacctctttcttctacggaagaacgaagatttcttgttcacgacctgatggggtcctgtgcgagttgaggacggagaagcacctgcagggctcttaactgcttgctgaggtcgtagctttgggctggcagtcatcccattggtttctctactctcattttcttgtaaatgtgacagatcgttggcgtttatacttgctgcatctgccggtccagggactgaattcttagatccaaatacacgccggaagaaacctgggcgttcttttgtgattggagcagtatagttggtggagatgttggccgaaattgtggtggttgccgttgagtctgggggaggaaaagccggcttgttataggagatggtcggactgggggcaggcgagtccaacgaagccgcaatggtcggagggaggccaaaatccgtatcatccatattctggaagtcgttatcccgagctctgagagttcccgtggcgagattttcaggccgaacctttcgaacctggggggcataagcagttttcaaactgttccgtcgcggtactaccggtgtccgcgcggcagcagttgctggcgtcctgccataatcgtgaacctttcgtggtcctgccgggacacttggggtgggtgcagcatcgtgatcgttgtacagcgtcaagtcctgcccgacactgggatcagcataaggtgcgaacgctcgttttggcccgcaatcgaagctggctgaacggcggcccaagccatgatctgctcgtgctcttgggattgtgtatgagtagtccgcggtggaggatgagcttcctttgctgtcttttcgggtagtatttgttcgtggcatagttccgatacccccgcgcgagcttcctatctgcctcggtgtctggttattggagctactgttgctgcgtcggcccttcgctgtgattgttgcgtagcgatcattcccatcttcgtatccgtagtctggttctgaggacactgacgaggagaaggtgtgtccgcggtaccggccgtgcgaatcggattcttgtgagtaatgactgtgatggtcggtttcgaaggcggaattgaaaagacgatagtcgtccagaacagacgaactagaggcgaattgatcgagcgaaagaagcatgttgtcgacgatcgacgttcgtgtagcatgttgcggggatagagagagatcatgcgggtctcgatcatccgactcactggttctcgctggattatccatgacatctgggaaagcatcgcggatggaaggtcgctctgggtatcctcgtttggagggcttgtatcttgcggtttgggagggtggtgtatggggaggagagtacgcctcccgttgggacattattgcgctaaccaatgttaattattttattccttaggctgatcagatttccaatccacacaaagggaatgacaggctcattgtagtagttgaggggggatggggggattcggagccactcggtttccaacataccagatctcttgcaggtctcacaaggtaattgactaaactgaattcgacctgcagtatccgatttgacgaattgaatggtaattcacttggtcattgtcccacgaggccagggatgtaaaaaagaaagaagatcaaaggagtgtaaaagggtgggcaatagcaagaggaacaagaaaccgggggtggaacgaactcctgagagtcggggaggttaggcgggaactttttaaagcctctccgctactgtattggtacttttttataatatgagacatacatagttaatcaggaagaatttaacatatgatattgaatagaaacatgcgaagggggaaattgcttgggtttttagggatctacagattcaggggtttcatacatgcatattcagggcttatatagttactttaggtcgacttgaatagtagtatgttataagatatggatattagacagcatatatcaatgctctttgccttgcaatccttcaagcacaatctacaatctacaatatgttgtatagccaaaagtacacaagtggagctgtggggatggatcatggagctctttgtatgttgatttccgtgaatagagatagatctccgtagagacagttatagacgaatgcctgtgtagatataagtgaatcccagactaataactagagcactccctatatctctttcacggtatactaccccgtatccatgtgaactagtgtatgtataactcaagtcttatagattggccccttgcagagtggattatctggagaggaacccttttccagcggcaatgacacctgttcagaagagacatgagttgagatctatctagattgtaaatcctagtagaagagggtatcttatacagagtactgtgtccatcaggaactacataaaacataaaatccaaaaatcaacaaatgaccgatatacccaacacgtgatcaagaagatgacataaccgggcccaactcgcatcggatacacgtacaacaattgaactgcattgtgaatgctccgagattgatttccctcctcgaaaacggggtctaagatcatgaaccctcacatctctgtcccccgccaacatgccggccctgccaacttcggctcaacacctgcaacccggtctagtgtccgcatgccgcgcttcttcaagaggtagtaggaccaaagaatcccggcacgagagacaatcactgatatgggacaggcttttcaaattcccacaaatggactttgaaatggcaatttgggagatgacctcgttgctgatcgcacccaagaaggtattcaaatcgatatactaccatgtaagtggtctctatcctaactggccctcgaactatgctgatcatgctatctgatttagaaacgtgagtctacttattattccaaacttggctagtgcctcgattgaacaagcacatacaactggcaataccggttactatcgtcccagccgagcactattgacgccttggagcagaaaccaaaaacacatggcaccggcctgatccgtcattcacctacctactatcattcttcctcctcctcacagccctcgcatggggccttgcttatacgccaggcttcggcgcaattatacgactcgctttcctcttcgtgttcgtgcatttcatcggctcgtcactgctcgtctcgacaattggatactttatcattggccgtctattcggtccgaacggagctgccgcctctctagctggcctgcggggctcccgtggccgaagacgaggtgccgctcagggcttgtttactcagccaggggagaaggagcaattggagtttggatattgttttgacgtaagactccctgccataaattccgtggaatctccgactcactgacactgtcgttgcataggtatccaaccgggccttctttcctctatatctccacctctacgtggtgcagttcctccttctgccgctcctcacccgcagcccgagtaatttcctggctactttccttggaaactcgctttacctctctgctctcatttactacacctacatcacgttcctgggatacaatgctctcccattcctgcacaacacagaacttctgcttgtgcctatcctcatattcgccgttatgtggctagtcagcctgattgccggttggggcattgtcatgcaaggccgcagcgttgaggggttgttctggggcgtgtgaagtagcaagcttcccccgaattatatcctctccctgggatttccattccctgtacgaaacctgaaatatctcttttgtcgggctcatccctcctcgaaaaaaagccagccccaaaatgaggcgattatctaatgctatgggggcgtcagtgtacatgatttcaatttacatgattgcgcatatttcctactgtttgattgattccagatgtccaatgtgaagagtatctcaactgtttgctttgtttttttttttgttgtctagatgtgtaaccaacaattcgacccaagtcatgaccacatataaagcgaaatccacaagcttatttcttaccaactttcttagtcttccccgaagctgcagcacgcaaacgatcctctcgctgctgagcggcatcggcacgctctttggcttgctcgtccttctcctccttctcggccaacttgcgcagacgctccgtctcacgctgctcacggataacggcgagacgagccagatccgacttcgcctcgtcagtcttaccctcggcgtgcagcttctggtaacgttcacgggcctgctgggcctggacggcctcgcgctcccgtcgggacaactgcgagatatccttgaccttagcgggcttcttgggctcagcggcggggtcggcgacgggcttcagggtctgcgagcgggacttggcagtgtggttggggttggcggggagctcgccgtcggattcttccgagtctgaagggggtaagtcgcccggttgggcgggtccttggcctcgcttcttcaatgcggctgccttcttagctttggcagcagcgcggcgctcctcgcggcttcctgcagctgtggatgactcgatcggcttgaactcgtcctcgctggattcctcggagctttcttcttcggatgaagaatcttcgtcacccgatgacttgatttgctcaccaggctcctatgagagggatgttatgatcaggatgctgtacaaattgagttcattggggctgaagttcacttacccgccagagacccatttgattgccatccttgtctaatggctgaagatctctgctgaagtgcttgcctcctattcatcgtctgatcagtttcaagtatctcgtacttatgctcaggcgcacacgacatacctcctcgagtaggcttggagaactttcctccacgaccacggggcgccatattgatatgtaggaaatacttgagagcttgagagctttggtaacaaggctgaagtaatgtatatctctatatcgagaacgagttagcgggttctcattgaggggggtttcgcacacaatgaatggaggggcagaggcggggtgtcgcttcagagttcctccaggatgggatcaaaataacaaatcacttacatggagaattcaaagtagtttaaagatcttcaaatgttgtaaaggatacaaaaattcgaagggaacaagttcgcgagttgtcaagtcaccgcgctcgcattaaatcacatgtggagacgtttttcttctccgtcaaaccacaagtcgttgatttgttaagacatacaacatgcaacatacgacatttgggatatatgtatagcattatcattatatcttctatattcctatatactatctattttatcatattctcattcatcagactcgagctataccagtgcccaccttggtcactcgagccccaatcaacgtcaatccaccaaggaggaccgcagatcccatgaacatctgggcgtacaggtaattgccattatcacgaacaactagctcaccagcaataggagaccctatgagggctgccactgccaccacgctgagtaccatacccatgcgtaccccgatcttcttcatatcagtcgtgagggtgctgagggtcgctgggaacaacgattgaatacccgcagcaaagaggccataaaacacagcaaatgtccatagcccggacaggccgtggactgccgcccagcagtagccaaccaaggccgtcgcgaaactgaacgggatcaacaggttgagaggaccggtgagctgatcagcaagcaggttggggaccaatcgcccgaccaatccgactccgttcatgactaggagcagatcaatagatcgatcacttgacacgccgatgatgttccgactgaaactgccgatgtagaaaaagccgacatacaggccccagaagttcatgaacatgccaatcgcaaacagcaagtagggcagctcggtgaaggcagcccactcgacaatcggaccagtcttacgtggaggaagacgctgcttaaggaacagcacacagggagtcagcgtggctaccgagataaagcccagcgttcgtattgtccacccatatccgacatggggcagcatcttcatgacaacagccgggaagaccaggccccccgtcgcagagcccgatgcaacgaggccaatagcgatgccacggttcttggcgaaataagtcgagaccaaagctagggttgggcagaacatgagaccacacccaattccttggccaacaccctgtgctaggaatagctgccagtactttgtgcagagcgaggtcatgaagatactgaagcattctaagatagcaccgcaggccagagtaaatgtgaaataaccggcatcggtggccctgccggagaaagtgccaataaaaaacaacaaaaagatctggatactcccaacccaggagatatctgagggcggatgtcccagtgtctgggaatagtatgtctggaagacgccgaagctattgatataaccccatgtattgaagatgacgaagtgtgcgagggcaacctgcgaccaagcctgaaatccgccgtccggaggcggcccgagatctttgccagattcccgagtgcgcaccgccgagagggtacggctcaaggcgctggtgttggttggtatgtgggaaatgttgagttcatgtctgatggttgattcttcatctgaggaatggcgagtatggtctatgtccttttcgttctctgtatgttcttcggtcatacttgagggtttcttggatatattggccatgttagaagttgacatggttccttgatgcgccttgtacatgtaggagtcttccaagataacaaaaaacttgtcaaatgagtcaagtcaaaattggggaaaaattcttataacggggatctttccgatcgtcgttcgcagagatggccgcgcccttcggatgacaggtccacttccgaagttgtaagcgtatctttttacgttgcatctatattgtatctatagctaactcctattttccaagttgaatagcctctaatatctacattatacatgtatctatatatcttatattgaccccacactcacttgatatggcgcaatcccggggtccccgcaaaaccggctctctcggatagttctaggtacgtctactctttgtatgtgacatgacatttcagggaattcaatggctttctttctagcacgtaaatacatgtgagtctatacaaaatcatggcaaaaaaacctgtcgtaggaaggtgaaaagcaagggagcataaaccggagccgagctaaacccgtgttggcggaggtaatgcttggatagcaagcaacctttgaactagtgcagtgtcttaatatgggactaatgggccgctagcaatagatcaacccatcttcaagatcgtgtgataatttccggcatgcggacctgaaacggatgccaaggctagattccccgatgaagcatggcgtatacttggctgtggcgggtaatcatcggtttgttggccaaagtcttgttcaaatctcagtgatcttggttggcgctgctaaaaagcatttgaattgacccaataacatcggccggttccaataagtgccagctggcatcggtctgctttgagctggcgcccaccgtaactgagtaaacgtggtcgcgtggtagatcaaacttcttgagggctcggaacatatctaaattgaatgttaatccaggatctcagcatcaatcaggtgggcaattttaccttcatcggtgaagtcatcacccaaacataggatgaagtccggtgccttccccggggccgtgccatattcgtcaaccaaccgggtggcgataaatcccttgttcacaaaggttggccggacctctagattggccttgcctgccatgacttccacatcccatcgtttggcgacagtgtcctccaaagcctttcgacactcgcgagcctggaacgcaccgtactctgggtctgcacgacgatagtgccaggtcaatgctacccgtttccgttcaatgaatgaaccttgtgttcgctctgtgtaatgttggaagacatcaaccacttctttctgccatcccatgtcgcttttctcggctaaattctcccaatcctcagatccgggctttcggataaaacaaccgtgctcggcactcaatcctagttctgggatatggcccatccactcgtccaggaaagcctggtcccgtccactgataatccacacggcatttcgtgggtcagccgataggctcttcagagtacggagtacccgatctgaaggaatggctgcctggggatccttgacaattggtgtcaatgtgccatcgtagtcgaacatgaacagtcgtcggcgagccttgcggtactgcttcattagttttgcgcgatcgagtgcaggtgtagcgacggattggtcaaaggacgaaaggttggtcagtaggcgattgaggaattgcctggaccacatggaaactgtgttggtcaccacatgcttgtataactggaggtgttgctcctttcgctggtcggctggcatagtcaatgcttgattgatcgctccagccaccccgactagatcccacgggttgatgtggatggcactaggcagggtgcccgccgttccggagaattcggaaagaatcaaagggctgtggttggtttgttgacagacaatatattccagactcgttgtgttcatgccatctcgcaccgtagtgatcaagccgacatcggctacacgcaacagagcgaaatactcgcgtggagataagtattgcggatagtactgcacgggcgagaaactcaaagagccaaatcttccgttgatggtcgaaaccaaattggatatttggccagcaatcttgttgtcgtcttccttctcctcttccacgctagttggactggtcacctggatgaggacgactttgtcacgccattccgggtagcgctccaggaaaatctcgaatgcctgtagcttctgcgcgacgccgcgaacactgtcgagtcgatcgcggccgacgatgattttctttccagcgtagagcttgcgaatgcccaacacagtcttctcgatatccggagccccaaaggcggctttttgaattgaacgtgcgtcgatgccaataggaaagacatctactgcaacatgggcgccgtgggcatccaccccggcggagttggactcaaagcccaaaacacgtgtgcagcacgaggtaaagtgtcgagaataggaaaatgtttggaatccaatcatgttggcacccaggactccctccaggatctccttgcgctttgcaagacaccggacgaattcgctgcttggaaaaggcgaatgtaagaagaatcccacgtagatattcgggatacgttgccgcagcagactgggtagaagaaataaatgataatcatggacccagaccacgtctccttcttgatattcctgcacaatgcgatccgcaaacaattggttcaggcgcaggtagtcggcccaccaccgtcgctcggatcggccatctgtcgggccatgttgcttgtagtggagtagaggatataactcacgttcggcataacggcgccatctcccttggtctttcagcataatagtctcttctggttcttctgatgcatccgacaaccacacaggcaatacccggccatgacggcctgagctcaattgttcatcgagtcgttctcggtcctgttgggtgacactaattccctctaccagcggatgagcgggtggcttcttggttccgtccacgggaaccggtgcggcagccttgttcaatgcttggttggcaacaaggttactgggggttagaggtgcgactacagaattgggatgtatttgctgcaagggtgctttcatgtccacatcaggctcgacctctccggtccagcctactaaggtgtgagaccaagatgtctcatcagatgcaagatgtgcaaatgaatcgaacagcgccgaagtaccggagcgcgatttgagcgtctgtgatccggtcagccaatacgatctcccaaatagacggagtcatccacgtacccagtctgatcccgatcgaaagctgagcttgtatggtatgcagaaagcggcactgatgagacggccactcaagcgaagtcctgggtgttctaggcgtggatcagtctcgggagattcagcggtcaagcttaagcggcgcagcaaatctatgccggatgatgctctctctgcagtctgcactggctctgacttagtctcagacgggtcggcggttacagcgttggccctggggagattgttaaagtatgaaggggcctcgctcgacgtcttctccagactgggtgtcgcatttgtcgcttgagtgtacgcgtcatttttgagagcctttaatccgggcccaacgaggacggggtttggctggtcatcgggcacctgcgcggggctctctgattcagacatgacgagcagatgagcagatgagcagtcaagcagtcaagcagtcaagcagtcaagtagtcgagcggtgcttatgacgggaagatggaggatgagatccggtatggtttgattagactgtgggagttagactgcaattgttacatgcaccaaggtccggggaaagcttgacgtcggtgggttgaaaatggggagatgatcaaggctacatacctcgggggattaggactgactggataagcaaggtcgggaggggaatgaactatgacagcaaagccatggacgatgtaaagaagatgatcaaaacaaaaacagatcgactataaagaaaggaggaacagggaatagtaaggatggaggggcaagcggtgaagtaaagtcgtcttatcgagagttatcgagggaaatggcctggaaagcgattagaccacttttcaggacaagatcttcgggttgacagtgaataggggaataactagaaaatagaaacagttcgaagacgaagatgaagagagtatggagggggataggtggatatttcctcagtgctacgtcatgtatggatttctttctctttctatgcgctgtcgtatgaggtcctctatgcacttgtgatctagatggaggtttcgatgtagaacattcatccatgcaggtatacatcgcagatataaaaaaacagaacttgttagaatgcaacccctttgtcacatggcggtttcggcctaaggcatacattctcaaatagttcaagttgtgcaaaatacccttaggaacctgcatgcatcctcggcatggtgacatccactccggtgtcctttgctctcttcaaatgccctaagactgttatgcagcttccgagcctacctttacgcatccgtccctctcacctctttcgtccattccatagctctgttgcggtagccaagacccccgatgtctttgccaacagcctgcgaaagaccctagaagcccatcggtccacaaatcggtctcgtttgattcgcaaaatttaccccgttgaagatcccgccggactctggcggcctgagatcccatctaagagtcgcgcggactaccaaccaaccgtggaaccagctctgccggactcggaatattcgccggatactcctgacccggggtctaaaagacgccagaaaaaacgcgcaagtcttgttgatataccgtctcaccaatcactcatcagtcaacgtggagaagatgcgattcaacctgcagggacaggtcgtccggcacagagtccatggttgacaaatttggagctatctcgcgccaatgccgagatcactctggatgcagaaattcgagcattgcatcaatatctgagcctaagagctcgggaacgagaccgcgtagagaagctcaggacagaggtagcttcacttctcaaaacagtggtcccacatgctccaagagtcattggatcccactgcactggccttgtactggcgcactcggatcttgactttatactcccatatgaagacccttctagatcactagaacgtgatcgaagaccaagccctacgcggcctcagatccaagatgcccacatccgccttctgcgtcaagtccaaagagctctacagcacaccgatatattcgacaatgtcaaaatatctgacaagcgaaacccttcactatcagctcgccaccggccgactggactcctgctacaattctattgtggcgaggatatccctgccatcacggagtatctgcaagattatcaggccgaatatcctgccctgcgacctctgtacgcagtaacacgtacactgctagaggcgcgtggcctttttggctcatcgcaggcgagcgttgggccggatgcgctagccatgctagtcgtggcattcctgaagatgaaccatggccggtttcccgggccaaatagcttgggtgaccagtttcttgctcttctacagttctatggtactcaggttgacctcaagtctgtcggtgtcgccgtggatccccccgggcttttcagcacagacatgttgcctgtagctcgcggggctgatgaaactgcccaccagcgcggtcagcgttctctgatcaacgtcaagcggaccgctgcgggaaagctcaatatgcctctcttcatatttgtgttgtgaaaagcagcaccctgcaagccctgtcactcttgatctcctgctttccagtgcgatctcgggttaccctaatattagaactttagcaaactgccgggccgactggtttctagatgtgcaagcggataagccatgagaagtcatatttagcggaactttcttgttgcgcaacgattatgcatacaagaccctacccactacatgaatgatctaggccggtcgtgtactcggacttctgagttacagagtgcatttgcagctgcgtgtcagcagcttcgtgacgcatgtgatgaatgggcaagcgatggcaatatcaagagttcaagtgtccttgccactactctacaggctaattttgatggactagagaaggtgcgcaatcaactcgcgtacctctagccaaaggaagttgtagtctagcggtagatcgagcgatcggctattcaaaataatatcgcctatacatctggccaacacatgtagaactcgctatgcgatgggtctcgtctatagttttggttatcggagtctctttgtggtcactggacaaagaaacactggatgtcgttgtcccctcggatttctacaacatattcataagcaaagcaatttcgattccctctcttagtttcatctttcctcttgaactcagcagcaagacaaaagaacgctgaaggctacgttctcactcgggggtggtgcccatttgattactaagtctgtttcacgcggacgcgacgcgacctcgggcttatcagttcgtggggttttcgtggcagaaaaccgcgacaatcagtcaagactgacgagtccgttcgctatgctagccgctggctttggttgataactatttcttcaaatgtcatcccgcaagcgcgtgcagaagtctacggactccgacgaagaaagcgatgggtccaaccagccggccatgagttcttcagtacgattccagcaagtataactttaagcagagctaagctaacagtcacagagaaaacgacagcggacaaattcagagagctcaacaaactcggaatcttcaacctcttctggcgctgataccaataccgattcacttctagcagtcaacgacgatgcacttctcgacgacgaggacgagctagagctccgccagacccagatcatacaagaaaaatactcgcatttgatcgacgaggccaatgtgcccgccgatcatggaatcctcgaacgcgttgagtgctacaatttcatgtgccatgatcacttctacgtcgaacttggtcctttgatcaactttattgttggaaagaacggtagcggcaagagtgcgatcctgacagcgatcaccctctgtctaggtggcaaagcctctgcgacaaatcgtggccaaagtctcaaaagcttcatcaaagagggcaaggaaaatagcacgatcatcgttcgcatcaagaatcaaggcgaaggtgcctatttgtcagacgattttgggaagaccattattgtcgagcgccatttctcccgaagcggcaccagcgggttcaagatcaagtcagagaatgggcgcatcgtctcgactaaaaagagcgagctggatgctatcacggactatttttccctgcagattgaaaaccctatgaacgtactctctcaagacatggcccgtcagttcctaagtacatcaagcccggctgagaaatataaattctttgtcaaaggcgtccagttagaacagctcgataacgactaccggttggtggaggaatctcttgactcaattgaagaaaagctcagaacatcagcccaagacgtacaggtccttcaaaaccgcaaggaactggccaagaaaaagctcgacatctctgaccagcacgattctctgagaaaacggatcagaaatatccgaggccaaatggcctgggctcaagttgaagagcaagaaagagtcagtcccaccctactccccgctttgatgattgactgacaagacagatggaaatttcactcacccaacaaatcgccgaggcggatcagaaaattgcggagaccgagtctcgccttactaggtttgatgctgcctttgatgaagtcaccgcggaggaaacagctgccggtgaacatgcctggcgagctgccgtggcagtgaatgaggcccaagaggaaagagacaaaatcaaagagaaattggacagtgagatggccggccggcatgaccttcaggtacgtccttcgagtcaccttgaaataccttctctgactgttttttataggcagagcaacgccagattagggaatatctcaaagcggccgagttgagaatccaagaaacccagcaaaaagtcgatgatgagaatcaacggctcgctgatgtgagcgatggtggctacactcgaaaacaagaggagtgtgaacaagccgccaatgacgcttctgccgccaagaaggaatacgaagagcaccgccaaggtgccgctcgcctacgggaagacattgaaacagccaagcgagatttcaccgaagcgaaaggtccgcttgaacagaaaaaacgcgagattagtcaagcggagaaccaacttcggaacctcaccaaagaaggtggatcgagacaatcgggcttcaatttcaaaatgccggcactcctcaaagccattcaacaggaacaatcatgggaatcgcgccctgtcggcccaattggtcaccatgtcactctgctagaaccgaagtggtcatctattttggaaagagtgtttggtggcacgcttgccagtttcatcgtttcgtccaagaatgacatgaaacttctcttcgacatcatgcggcgtgtccagtggtaagttttaccaggggtcctatattgaaactgaagctgatctgacctgacctgatagcaattgtccaatcttcattggctctggtgggcgtttggacacctcagcacatgaaccagactcccaatacaagactgtgttacgaacacttcaggtagccaccctctcccgttccacgattcatggaacgtgctgacctttcagatcgacaatgaattagtgaggcgacaactgatcatcaaccatggggttgaacaaatgctgttgatcgaagacgtaaaggaagcctccgcagtactattcgacggtgcgcgaccaagaaacgttaagcgctgttactccattgacgcaaaagatcgacgtcgaggaatctatctctcatacagccgagccggagaaccgagtcaggctcctgttatggggtggaccgatggtccgcgcatgaaatccgacgtggccttgcaaatcaagtaagtaagcctccttccccgaaacctgtaacagtggctgatggctctagcgcacaacgcgacatcattgccgacctccaacgccaacagaacgacatcgaacagtcattggtaactgcccggtcacgcatcgaagcctgcaaacaggcattggtccgacacggaagaattgagaaagatttgcaaattcaaatgcaacgaatggaagatcatgccgaggcacttagagacgccttggataaagagaacgccgaggatggacgcattgatgcccttttagcagcattgaaggaagccgaagatgaaaagctgctcaatgagggatcatacaaggatagtgaggcagccatgaaaaccacattgcagactctcaaagaaatccggcgagaactggccgccaaagattctgaacttggaaccctccgagaaagactacaagttgctgaaagcgagcaaaatcttgtcaaaacgaaaaaaacggaaactctcgacgagaagaacgaagctgttggacttattaaccaagataaacagaccaaggctgaaatcgaggcgagaaaagaagcgataaaagcacgggttattgaatacaacgaaaaggccaacttagtttcttctcgagttcctgtggacgaaggagaaacacccggtagcctcgacaaaaagcttgataaattaagccgtgatctggatcgttacaatttggagtatgtctcttgcagcttagcgttagccataaaactgacaatccataggttgggaagttctcgagaggaaattgctgctgaggcaacaaagactgcagcaacttatgatcgagccttgcagcaacttgatcaattctcggccttgagtcgggtaattacccccttgttttgttggtttctttggtctaatctaatattcgttcaggccctgaaagataccctccagaaccgtaagaagagatgggaaatcttcagggcgcacatctcgtctcgagccaaagcccaattcacctatctcttgagtgagagaagtttccgttggcgggctcctgccnnnnnnnnnnnnnnnnnnnnnnnnnnnnnnnnnnnnnnnnnnnnnnnnnnnnnnnnnnnnnnnnnnnnnnnnnnnnnnnnnnnnnnnnnnnnnnnnnnnnnnnnnnnnnnnnnnnnnncggcttctggccgaccatgccaacaaacttctggatctacacgtaagcctgttcaccagaaccccagaatagaccgatcaatgctgactactgtctaggttgaacctgatatcaccaaagatgatagcaccgggagagatgcaaagacactatctggtggagaaaaatctttctcacaagtctgtctgttgttgtctctctgggaagccatgggatctccaatacgttgtcttgatgaattgtaagttttgttcatggtatggtttgggtcttcatgctgacttcgaaagtgatgtgtacatggatcatattaaccgaaagatggcgattgacatgcttgtaagtgtcacttctctttcctagggctctttactgactgacgaatgttctagatggttgccgctagacgatctatcggacgacagttcattctgatcacgcctggtagcaagaccgatatcaccatctctgcggatgtcagagtgaaggagttggcagagccagagcgtggccagacgacactaaccttccggcgctgaactcgtcaattctcggttaatcttatttgcagcgaaatacccttaggaaatgccatgttcttgccatattttaaattagttccacaccttgtgtcatgaataaaatcgtagttgtagtcgagtgacacgtgaccataaccagaggaacgtttagcttcactctttacctcaaacctcttcgctccccgccatcataatctcaacatctcctaccttcgtaccttttttcccctatttgtcaacagagctggtttataccattctttattctatctgtgaactcccccagctttggcatcaaagatctttcttggttccacacagaagcttcatatcattgaatacctgatctcccatttcctccaacccgaccttattggtttcgacgaatatctctcttctcccctcccgtttccgttacctcgaacctctgccaaaacattcctattctaacttccgcgcaaccatttcacacaccttgatcgcaaacaaaatcggtcacctcacttgctccccacctccttagcaccttatcgtcacaatggccgacgcgcttgctgcacaactcagcaatactaagctgtaggtcgatctgtttccttagtccctaaaacaaatctgactagaccagggaagcaacttcagagcaaaaactgcaggacacattgaatctcccccccaaagatactcgcccacaaactgaggtgaatatattgtgactgccagtcaatgctaaatactgactttgactaggatgttactgccactaaaggcctcgaattcgaggacttctacatcaaacgtgaactcatgatgggcatttttgaggctggatttgaaaagccctcccctatccaagaagagacaataccagttgccctcacaggcagagatatcttggcccgagctaaaaacggcactggaaagactgccgcctttgttattccaactctcgagcgcataaaccccaaaagtacaaagacccaggccttgattctggttcccacacgagagctcgcactccagacatcacaggtctgcaagaccctaggcaaacaccttggtatcaatgttatggtcaccaccggtggaactggcttgatggacgacattatccggttgaatgaccctgttcacattcttgtgggaacccccggacgagtattggatttggctagcaaaggtgtcgccgacttgagcgaatgcccgacatttgtgatggatgaagcagacaagttgctgtctcctgaatttactcctgtcattgagcaacttatgtccttccatcccaaggatcgccaggtcatgctcttcagtgccactttccctttgattgtcaagtcatttaaggacaagcacatgcgtaacccttacgagatcaaccttatggacgaacttaccctgcgtggtatcacccagtactatgctttcgttgaggagaagcaaaaggttcattgcttaaacactcttttctccaagcttcagatcaaccagtcaatcattttctgcaactcaaccaaccgagttgagcttctagccaaaaaaatcaccgaactcggctattcgtgcttttactctcatgctcggatgcttcagcagcaccgtaaccgagtcttccatgacttccgcaatggcgtatgccgcaacttggtttgctctgacctgttgactcgcggtatcgatattcaagcggtcaatgttgtgatcaactttgatttcccgaagaacgcggagacttatcttcaccgtatcggccgttcgggccgtttcggacacttgggtctcgccattaacctcatcaactgggaggatcggttcaatctgtacaagattgagcaagaactaggcactgaaatccagcccatcccgcagaatattgacaagaagctttatgtctatgattctcctgagaacatccctcgacccatctccaaccctccacctcaaactggagctggatccgtgaacatgaacggagaccgtcaacctcgtcggaacaacaacaatgggcaaccacagagtcaacaacagggtcaacagcatggtcaacagcatggtcaatactacaataatcgaggacgcggttcttatcgtggtcgtggacagggccaacgtcgtggggcacaaaatgacgccaaccggattacctttggtcaaccaaatccgggtcaacccccggcgcctctttcttaggcccggacacgcctgcacaacacttttcatatcgctgcgctttggtttcctcgattctcttattctattccgctctatcttcgagatcttgtcgggctatcccggcattgattttccggtcataatgatacgggagtgcaatgtatcatatgtctttttccattcaggtcccttgtccaatgagttggatccttgaggaagatgcattttcggcgcctacgctcttcgttttccgaggctgtattctgtgtttcaaggacttgaaggatttgcaaggatttgcaagggcgttctacaggacaagcgtctcatgtggcttttttcccccatgggctcctttttattttcccgacgcaacgagtgatgatctcaccctttaccaaccttttgttggcagcctggagtcctcccaccactctaccatgcttaacctcattcctgcctacgctcactttgtgtgattgccgttgtcaatagacacggtgcacacaactctcccactctcccactctaaaaaaaacaccaaaaaaagaaggaaaaaaatggaggagcactagttgtctaacggatctatttatatcagctagtgaattgacaatatccctccaatttgttccactgtagtaagttgtaggacctcgatgcagtcttcgtgtgtatatattattcccatatgaatgcgttttgtaaaggaactggtctcctacttccctggctgattccactgattccatagatccatcgactgcgggaatggcacgtgccgagggccgtatattgctggatctccgagttcggcgaccgcaattcctccaaaccaccaaaaagaaaatggcgacggtgaataaggatcacaagggaaaggtttgttctccagccaaataatacagtccacttgaagctcaccaataattagcccagtgcccttcgctccatccttgcggggtccaccgccggagccgtggagatcggtaaagagctcaatgacccctaccaggccgctagctaaccgtatactgcagcgatcacatacccggccgaatgtatgaccctttgaatgtcttccaacgatttttgctaatgctacgaagttgcaaagacccggacgcaactcaatcgccagcttacccacggccaaaagctaccatggccaccgtttggaagccagtggtatgcaggatgtacaacactgattatcggaaactcgctcaaggccggaattcgtgcgtctaccttccgcgattgtctggggcagcgctgatgtatactaggattcgtcgctttcgatgccataaaatcggttctccaggatgagaacggcaaaatctcaggaccaaggacggttgttgctggatttggtgctggattcaccgagtctcttttcgccgtcaccccctttgaaagcatcaagactcaattgtacgttttctgtcctatttctggctagctctactgaccgaattataggatcgacgaccgaaagtctgccaaacctcggatgcgtggttttttgcatggtagcaagctcattttccaagaaagaggtgtcaagggtttcttccaaggctttgtgcccaccacagcaagacaggccgccaactcagcaacccgattcacggcctacacaacattgaagcagcttgcagagggctatacggcgccaggtgaaaagctgggcactgcagccacatttggaattggtggaattgcagggctcatcacagtgtaggacttgatctctaaagacgatgggcaaaaagacacatccaagctaacatgactcagttatgtgacccaaccattggatacggtcaagacaaggttagcatccccacgcgcgctaatggtatatataaggtcctaactatattagaatgcaatcaatcgaggccagcaagcattacaagaacagcattgtttgcgcaacaagaatcgtcaaggatgaaggtgtcctcactttgtggtctggcgccatgccacggcttgcgagattgatcatgagtggaggaattgtgttcactatgttcgtgaccaacccaaatcgtactatgaatgttgctaaccgctgggcaggtatgagaagactatggaagggctggacatcttggatccggagcgaaagtatttgtagaatatcaatacatggtatctctgtacatcaaaagaacaactctgctatttactctttgcgtttgccatgtcctcggcaaccatggcctcaacttccctatcggctatccaagcccgcacactgtccatcacggtatccaaaccatcaccgccatcaagaataccatccagattgtggacggtgatacctgtacgatggtcggtgcagcgactttggccaaaattgtaagttcgaatcttatcacctcgacccattttggccacaccacccaatatacctcgtctgagctgcataagctcttgctcacgagcttcttgccgggcttcggccagctttgcccgtagcatctgccacgccttcctccgattggcctgctgggatcgttcatcttgcatggagacaaccgtatgagtagggatatgagtcagtcgaatggcggactcggttttgttgacgtgttgcccaccagcacctccagccctcatcttctcaacccggacctcttgcgggtcaatatagtaatcgctgctggggtcttcaaagttcatggcactatccatctcactgccgtcctctgggaaactcggcaagaccattacgctgacggcgctagtatgggtgcgacccttggtctcggttgcggggactctctgcaccctatgtacccccgattcagtccgtaatatatcgtatgcaccattggcttcaatttcaattaccgcttcaatgagacggtcgtcggacgcgccgacctctgtgtcctgcttcaatattgttgggcggaggccccttctggagcaaaaggcaacgtacatccgtaacatctcaaaagcaaacaagcctgcttcatctccacctgcaccgggtcggatttcgagcaaacaaggaaggtctgcaaatggatgtcgcggaatgagagccttcttcagtcggtctgatatcgtaggcaaggtatcgcgactgctctcaaggtcttctgttgccaaagaccgtagttcggagtcagtgtcggggtcgtttaatagggatttgagctcgacgatagactaacggagttagtagggctccaacaaagcttcccaaggcgcttacatcgttggcatggacccattctttcaagatatttgcaaccggtgccagttctccggctcgtttggccgttttcgcatcaaaggattctcccaatcgctccgcaagctttgtatgttcatctgcaagtagacgtgctctgcttaaaagagctggagacaaggcataatcggatgctacgtcgcaatttagcattgatcagaaaataaccggaccggtcttaccggtatgtacacctcgcaagggagacagtttcagaccaagcctaggccgcaagatatttcgacatattgacttgacgagcatacttcgagtcagagtgtgaagaccaagatccggagcgaaagcgattggagataaattccatgtcacatgacggtaacggatcaatacgaggcgtaaaggccacggagtatgctcatccaacttccagtttcttgttcattgttcattgcgctttgtacttttctcttttggcctaacttctttggattatgcccctcttcttgtagtcctagggagactgattctacaccaaacccctcatttacatatccattactgcattactgcgtcgcatacccccgagatgctcgtttcattggaattattcacggcctttctggcttgtgtctcggctggatatgcccttcaaatatcgccagatacgcctctctccgaattgatctcttccgccaaagcccacctcgcgcagggctcaccccgagatgccgtggtatacttcgatgccgccgtctcgcgcgatccaaccaactatatcaccatcttccagcgcggtgcggcttatctatccattggcaaaaactcacaagcctcaagtgactttgatcgagttctagaactcaagccagactttgagggcgcccttctacagcgatcccgcttaaacgcacgctccgcgcattggcaagaggccttgcaagatctcgagcgggccgggaagaagtcgacggatgattacaaggaactagaagccgcacgggatgcggccacattggccctcaatgctgaaaagcaaggcgcctgggacacgtgtgtctcggaggcaaatgtggccatcctaaaggcaaatacagcactgcctctgcggcaggctcgagcccattgtcattttgaaaaaggcgagacggaggaagggctcagcgatttggcacatgttctgcaaatgtccccgaacttggtcgaaactcacctacaaatgtcgtccatgctgttctactctctaggagacagtgaccgtggccttgctcaaatccgtaaatgtctctataccgatcccgactcaaaatcgtgcaaccggctctatcgacgtgaacgaaagcttgccaaacagctagaaaaattgcatactgccctagactcacgcaagttcagcaatgcagcaaatctcatggtcggcgatagtgataccagtggactgatcgcagaagtcaaggccgatattgaagaagcaagacaagttaaccatattcatcgcctggcacccaataatctttacacattcctagtcgagaagacctgcgaggcttaccgtgaagtgagtgcccactacacatggcttggtttctgtcactaacatagccagatgcgtatgatcaaaaaggccggtccttactgcaccgaagctctccagcttgttcctcactcacttgccgggctcctctataaagcccagattgctttggacgaggatcgattcgaggacgccatacgtacgctcgaatcggccaaggaacaccaccccggttcccaagaggcgcaatctctccaacagaaggctcagaccctactcaagcgttccaagcagaaagattactacaaggtccttggtattagccgtgatgcggatgatcggacgatcaagcgcgcgtatcgccagctagtgaagcaacatcaccctgataaggcccactcccagggtgtaagcaaggaagaggcagagaaaaagatggcggctattaatgaagcctacgaggttttatccgaccccgaactccggacacggttcgacaatggcgacgaccccaatgattctgaatcgcaacagcggggcagtccgttccaaggcaaccaattcggtggtcaacagttcttcttccaacagggtggtccacagttccagggaggtttcaaattccctggtggattccgctgatcagattgtcttttgtgaaacataccaggtgttcgtggagtttctcgatgtatttgggaagctatagatcttttgaagcccgcatgagggataggtttaggaaagcacatgaactgatattatttctgttatttggatcgaagtaaatggtttgcaatctcatcctcgtggagcatctgtcaagggcacgtagctcacctggaagaccttctccctgtgaatggatccgtcttcctttttatccaccacccagatatattgacccccattgggatcaatagcaccctcgctgtcttccgattccaccgggatgaatagtctcccgggagcacgtagctggtccaccagagttggatgaagcttgtcggctgcggcgccaacgtggatggcgtcgtagggtgcaccttctttccatccaagacgtccgtcgcccgtgataaacttcacggtgccgttggtctggaacgcactacctttcttggacttgttcatgttggaacgagccatgtctgtcagctcggggatatggtcaataccaatcacctgtccctgggcgttgccggatgagctggtcaccaaattggcaatgacatgggtcaggtatcctgagccagatccaacatctaacacccgggcacctggtttgagataatcaatcagatactcacatgcatggccatgcatgtgcggtgctgatatggtggccccgtatccaatgggttgaggcgagtccgaatacggccgtgatggagcataatgggctcgatcaaccttggtcatgttagaggtgacaatgaatcagatatatatcaatatgctcacgcctatcatggcatcttttacacgctcattctggatcagtccggccttgaataggttctcgatcaactcggtgttggtagatccagaacaataccacgccatggtcatagcctgtgttgctttgtggatgaattttggtttgtatggactaatcatggactgaatgggtgttggatggtgaaagagagaagagttactgtccaggtatgtttggccaattacatagtatgtacatgtgtgtgactatatataaatgacgccatgatatctacattttcacacgtgatacctgaaatagtcacagttgcagtaaaaactatcccactaattcatacagtctataatgttatatctagtcaaactaaatttataatcctaatataccagaagggaatgcgtgcaatcacacgtagaatggctacagagtaccaagtcacgtgaaagtgatatcaaaacatcttacaggtccgtggacatcgccgactcatcgcgccgactacgcgcgttgataaaatcgccgtgggaacaattacacttacagggcatcatggacctctataggactattcacatacccctcatctgatattctcccctggcttcagccatcagtattgaccttcaaaatggcggaccgaggccctggcacagcagcgactgtggatctgctgattctcgactacatggtctgcctatgtatcagcggactcctagaaggtatttcacaagcaagagcatccgaggacattgaatactttgcgctttttgttgaacgtaagcaccagaactgccagcaatggaccatgcatactgaatatggctctagagctccaccggcggcttgccctccatcacctcgaaagccccctgccctgggacctagatttcaaattgcgcatcttctacatgtccaatctatttctccactggtacccccccaaagactacgacatgggtccctttgttcctctgtctgatatcgcagtccatttcttggacctatgcctcgatgcagtcgcccacgtatcccggggacgctggttcgacctcggtgctcacttcatggtccatgcgatgttagaagaacatgcgcgtttccccgaccagctagacgcactctgcaactggagaaccaacgacagtgaactcgatatatggtgggaggtcagccgtaactggttccttgggcacatgccacccccatttggtacggcgggtccaatgagccaagcagagattaatgaggggtttcccctccaagcactgcagcatcgttatgtcgagttcttcgaggacctcatggatgtactggatgtgccccttcttcttcagctggagcaaggtcagctggaaggtttgactcgggaggagacccgacaggttcgagagtattgtggaatttaatcttcctctacacaacgatacgagaaaatgcctttctatgtgcttccatgtgtaatgacgccaagtcagacacgtgaaggatcatgagttaatgcgcaacaccacatgtacactaactcgatcatattgatcgttcaatcttgatcaattttaaccaattcagatcgaaagccaatacacacataagacaggaatagtacttagagcccactacaagacccttgacatggcatttataacttggaacaataataatttacaaagggcgcaaggccgctctaggtacgagaacacaaacaacaaaaggcgcgtgacaaacactcatgctacttagccgagcagcatgcgccgggggtcctcaatgtactccttgacctgcgatgggattagtgattgattcgggcgaacgaggaggtagacataccttgacaaggaaagtaacggcctcacgaccatccaggaggcggtgatcgtacgtcagagccatatacatcatctaaaaatatcagtaaaccgaagaatgtgattggggttcctgtacgtacggggcggatctcgacattgccgttcacagcgacaggcttctccttaatggcgtggagacccaagacagctagacaaaattagacctgaacctcaaaaatagtacgagggagctcacctgtttggggagtgttgatgattggtgtgcccatcagcgagccgaagacaccaccctgggatgagttagccatgttattgtgaaacacacaaagagacgaaacatacgttgctgatggtgaaggtaccaccggccatgtcttcaatggtcaacttattgtcacgagcctaatacaagtcagtaagttggacaccccctctagaaaaacaactgctcaccttctttccgagatcggcaatggccttctcgattccaatcatatccttgccttcactgttacggacaacaggagtcacaagtcccttttcggtggcgactgcaacgctgatgtcaacgtaatcgcggtagacaatggtgtcaccgccgttaggaccctcaatagaagcgttgacagcggggatatccttcatggcaagcacacaagcacgggagaaggcgctcatgaagccaagcttcacaccggtcttcttgagagtatcttccttgtacagtttccggaactccatcagcgaggacatgtcaacctcgttgaaagtggtaagtgaagcggcggtattctgggactgcttcaggcgctcggcaatacgcagacgcatacggttcattttgacctagaccaaaattagcttaagcttaaaccaaagtcaaaggcccattggcggtcaacttacccggcgttcctcgcggttaccaatagaagctggctgttcggcagcttggggcttaggagcttccttgggaggcgcagccttcttaggttcaggcgccttgggcttctcggtctcggtgggggcgggcggggcctccttcttaggctcaggctctttcggctcaggcgccttgggttcgggctccttgggcttctcggcgccctcgtccttctttccgccttcgggagcggcgccaagctcgatcctgacgagatcctggccgacagtaacggtatcttcctcgttcacaaggaactccttgataacaccagaatccggggcattgaccgagacatcaatctgaacagaaaactcacgttagcgacagtactagttgcgagagacggaagcggagttggtatttaccttgtctgtttcaattgtcgcaatctcctcgtcgcgctcgacgaaatcgccaacctctatatcagaataagcaaatgtcaaaatgttcaaccacagctaaagcaccatacgttttgagaactgcttgagggtaccctctgtaatcgactcagccatgttggggaccttgataatggagtcggctaagcattattagcaattgaccaacaagactgcttaagaaaagcatttaccataggtgcgaagctgatggcctcccagaggagcaagattgagcctcgagacattgatgctatagggttgtatgagccaaaattgcgacagacagtaatgagattcgaatacttacccggaggagacctgcaacaagcccgaagctgagcgagccgaagccttccgcgtaagggtagacaatcccttgacattgcggaactggcttgctccccgaggagcggttctggccacagccgagaagcgttggcccgagaggcgcgcaataaagattcgagaagccatgatatgaattaaagcaaactttatacttgaaaaaaaccgaagcggttatgtaggagagaggaagaacttcaactctttgaaaattagagaaagcaggaaagatgaagctcggattaggtcgggtcaaagtaaaccgggcacccttccggcagaggcggaccattattctctacggggacgggcagtgaccatttgagcaaatccacgccgagcgaattaggaagcccagaatagtcaacctgacgacattgaagccctcaaccccaacccattgtctatcaggagccctaacgatctccaaggttgtcatacctgtttatagatctgtgtatcaacgtacacctttcttgtttccctcttcctcttccagttggccggaattggacccgggacaaaacttgagcacaatgtccacctctgctgttaagtgagtaggccggtgtccccctagtggactgttcactgatctactctaggtcgctctaccggcgctccctgaaattgtcttttgactgggccgtccaccggcagctctggcgtggacaagcagtctatatccgatcccttttcgacgccaacaaggacgtccgcgatcctcgccaacaacaagtatgtaaaaccgcaacttatggctggcaagcctaacacatgctctaggttttgttgcgcgagacagagaagctgttggagacctggaagcaccctgacccataccacgcacctactgcgcctggcggcaacaaatgggagcgcaacctgccggccccaatcctgccatgtatgttcatatcccccccccccccccccccccccccccctccacccaaccctcnnnnnnnnnnnnnnnnnnnnnnnnnnnnnnnnnnnnnnnnnnnnnnnnnnnnnnnnnnnnnnnnnnnnnnnnnnnnnnnnnnnnnnnnnnnnnnnnnnnnnnnnnnnnnnnnnnnnnnnnnnnnnnnnnnnnnnnnnnnnnnnnnnnnnnnnnnnnnnnnnnnnnnnnnnnnnnnnnnnnnnnnnnnnnnnnttcataacccccccccccccccaatgcaacattggatttgcactaaccctgaaacaatatagatgcccaacctcccggtccacactaagtaatatcgcaaaacacaatgaggattgggccaattgcaaacatgaaatgatgcaacatgaactatgcgtatcttccttgcaaatgtagagtactcaaatcagaatctaaaataagcaatttcgttcatgtacaatagccaccacgagagcaacaagtctccaaggatcgcgtttatatgtacaatgtatacaggaagtacgaaaggcaatatagtaaactttttcttaacaattgaaatacctggagttttcattgatttgggctcatgcccagagctagtatccgaaagttgaaatccctcaagcgagttaaggtcgtcggtatcatttcatgtccgtagacataatgtacaaccaggaaattgatggaagaaaaaaagaaaacgcagagccataacgtgcccgtcccataaccccattatcgtgtcaaagaaccaatccgcgccggaaaagaaagcaaacaaaacccgcgaaaaaaaaaagaaacccttacagctcctggctgcccttgccggccttgggagtcttcttggggagaaggtctgagattcatgttagcatggtggaaaagaaacgattggtttgagagagaacgtactctggtgaatgttggggagaacaccaccctgggcaatggtgacgtgacccagaagcttgttcagctcctcatcgttgcgaatggcaagctggaggtgacggggaatgatacgggtcttcttgttgtcgcgagcggcgtttccagccagctcgagaatctcagcagcgaggtactcaagaacagcagcgaggtaaacgggagcaccggcaccgacacgctgggcgtagttgcccttgcgaagcagacggtggacacggccaacggggaaggccaaaccagccttggaggaacgactgaagatgttgatgtcagtatgaaacgcatatgtaagaagcgaaatgtaaacaactcacgactgcgcgttcttgctgccgctagccttgccgccggactttccgccagtcattttgatggttggatttgaaaaagggggggttggggaaagaaaagaagttgtttgttgaagatgaaaagcttgggttatggtgtaaagtcgcaagagcagttgggagagcgtgtggaagcgaaggacctttataaggacgcggtgagggtgacgttgggacggcatcaatgggccctccagatcacggcctcgcttagacattgtagccaatgatcaatcagatcagaccttccgctttgggaatgatgtggtaagataaggccattaccataccggacagtcagctgactgtgatcctaccccacctttcccgtctttcccaccttaagacgcgtcaatgtcggtttaatcatacagatcataccaggctcttaccgtattgaaattcgtcctcctttgcaccccctccaggatcaactgacctttggaacacgagtataaagacgctgtctcccctcgtcaccgcgtctctctaacttacccttccacattccatctctgtttcccacccacacgcttcatccatctttacttcaactcttccaactctttttttcccaaccaaccttttttcaaatccacattcaaaatgccccctaaggccgctgagaagaagccctccaccggtggcaaggcccccgttggcggcaaggcccctgctgagaagaaggaggctggcaagaagactgccaccactgccactggcgagaagaagaagcgcggcaagacccgcaaggagacctactcttcctacatctacaagggtgagttgattcctgaacgcgacatcagtcttcaaagaaaaaccacgcgtccatactgactccattttcagtcctcaagcaggtccaccctgacactggtatctctactcgtgccatgtctatcttgaactccttcgtcaacggtatgttttcctcttcgcgaaatgcacgcgtttacgcgttcttccacgtcacgttttctaacttcattttccagacattttcgagcgtgtcgctaccgaggcctccaagctggctgcttacaacaagaagtccactatctcgtcccgggagatccagacctctgtccgcctcatcctccccggtgagctggccaagcacgccgtctctgagggcaccaaggctgtgaccaagtactcttcttccgccaaataagcggtttctttacgttttctttccagcttgcttttgtttttactacctcttgatctgttatgggctctgaggtggtcggttatgggtgttttgcgggtttctaatgcgtcatgggatggcttgaattttcttttccccgatgggtgatttttttttgaatggttaccactcgatacgtgaatgcggtgtaacataactcgggtctggggcaggcatggattggcctcccctactagaacgcgaaattccaaatgcttaattgcattgcatcatcattctatttctctttcctggtaaatgttccaagccaactaaaaatgaacatgggtgcctttcatctcatggtttgtctgttatcttactccatctcatctgaatcatccagcgcctcaacttcatccagagcctctgcccgaccatagccatgatctggctgatgctgactggggaagatgtgcacaataggctgtccaggcgtggattggattcgtttcttccagtcggcccaatcgtcttcgtccttgataagaaatccaatcaacatgctggggtccatgtccttgatatggattcgccgtagtcggccggtgtaatagctatccaattcctctttggtgtagagcccatctggtcggtatgatgttgcaggtcgggtggtatgcgggtcaaggaaaaagaggtggcagtcttgagcagccacgaaataatgcgatgccgatgggcgtccgctgtcttggtcagcacacgctttatatcagaacagacgcatggacctaccctgcaatgccaacggattggggatatgtcagtgcggctcggagtccatcccaatacgctggggtgacattatcgatccccagcctagttccaatcaagatgagcgtgggttgaattcggcctgatctatcgtgggccacgtgtgcaaatttgtcttcatagacgtccgatgtgtcattggttacatagaccctgagttggggggcctcgctttgatttgaaagtagcctatcaccatcagcatcactctatagctcgagttttggcaacactcactggatacatttagcagttgccgatggcccaaaccattcgcctgggtatttcccgcatgattctgcaccgcgatcgacaaattgatgtatagagaatggagcatcgggatgatcagcgaacatcgatattagctttgactcctcctccactttctcccctcgacgccagtctagtatatctggttagctcttgttgtggtgtattttgggggcgagggtatgatcggaaggatctctcacctcgtcctagtagtaaaactgaaaatgtgtttgccaaaaggctttgtccagatctgatcatgcagccccaccctgtatctgatgtaaagccttgggggtccatcagctgacttctcagacgtactcccagtgtcatcgaggatgttgcttctggtgtctttgttcgtgggattggtgtaaagtttgatcgatatgtgatccatattctcgatccaaaatcagagagaaaggccttgggccattctgtgtcattcaatatgctagcatcgggctcttctggggagctgtgtgggttgttggctatatgggatattagaaggttggtcttggagttatatcttcacttgagcaaaactcactgtcctggtcactgggtggttgcgggggggcatactctctgcctaggcaccatattgaagctgcaggtatgtcatttctgggttctgggtcccagaagtattgtactatgcgtttgcacttttccatgtccacggtcatggttggtgctgtttttctgccgtggacttgttgtagttgagggtaggtgagtcaatgttggaggtcagtcagtagtagattatatatatctcctggaagataacccagtgatttgaaaaccaagtgagtcaacccaggtcaccataagaggaaccgaggaaaaccccaaaccaaaaataatagagatacgaatgacaaccagtgaaatatctagacaaaagaagttggatcttccctttctcaggacatacgcaggtgagggggaagtcttccgtcacgagccaagacgtcaccgaccaactcctatgtatgcaatgagtgtgtaagtctgcactctatacatttacatttacacttgaaattgtcatttgaatattaataaaaacaattaaaaaacaagatcattcttatagaatcccctatattattgttaccctttgtagaatatctgtcaccgcccggacccaaaggcaaaagaatgaattcccccgtctgcttatttttttcccatcaacagttcagattcaccatcacctatggcccgccatgggaaattcaaggcccgtagcaggcgggcaccaccgtgtagaggtaaccagtgtgctcctgttcttctgatgaatactaacttattcaagacccaacgccacaccagtttaccatgcaggaagaagctcagaacaccgaaacccatcagcgttcatggtcagatagcaaccttcgtcacaaagctgttcacttcgtgagcgcaggaagcttgaagccgacattggaacaagcagacgaggaccagacaaaattggacacggaccgtgaagaaccgaacaccgacaacacaccggacaaaaagaccgacattgaggtctcgttcttcttcgactcaaagggacaaggagtttttcatacagagcacccagacccagtattgcagtccaaattatcggacatagacgactcgagtgaagatgaggttgtgttcaccggccgcaggaggaatacaaaacccgttctcatcgaaacgcatcagaacgagattgaagaaatggtgcagacgaatactgttgcatttatgcagaaaccacagacaccaacattggactatacgtccggggacccctcgcccgccgctacacctacagacagccttgaatccaatacagagagaccagactggccacagaaagaagagaccgacccactagccgactatattgccaacatcgacaacgactaccacgaggtagtgacctacagtgcaaatcttgaactagaaggtggcattgacgtcgaaaaagccgcaactcaactagacctgtcggcttcaagccatacagggtccaaaattggatcaccaagatcactagctcaaatgcaaattgacatcgaacatgattcaatttcaacatcaagcgaagacgacgaggacgatatggtcatctctggatcagacgaagacacacttgaagattttgtgttgctggaggacctggcgaatggatattctgggtccaccaagaagggttcccgttatggaaaaccctcatttcaatcggcgtcggcactggcggatgctcttgagtccgactcgtatttcgggtttgacgtaatggactttgaccggccaagtctacggaaaaaaaacaagggcaagcaagccatccccggctcggtactatcggatagtgaattcgagctacatgaagtctggcagaacgaccggaccaaaaagaagatacggaagatggagcgggcagaactccgagcgcaaggactactgggcagaaaagctgggaacccagacctcaaggtcaagtatcccaaggaaatgaacatggaggaattcatgaccgagattcgctcattcctcatgtctgccaaaaataggttcgttttatatctgctcattctcattcacctagctaatccagtatagcctgtccttgccgcccatgaccaagcaacgcagaaagctgatacatgaactggccaatgcgctgaacctgaaatcacagtcacgcggcaatggactctctcgcttcccggtccttaataagacggcgcgcaccccgcgatacacaccaaagactatatctaacgttgacgagctcttatccgggaggaagttcaaccgtcggttgttcaaatcatggggcacggaagtgccaaaattcccccaacccaagcgtggaaagtccggtgctgcttcatatatggatggcgatgtggttggtgcctctgctccagaaatcggagctgaaaaccgagggcgggctatgttggagaagatgggatggagtacaggtactgctctgggtgccgccgacaacaagggaattctgcagcctgtcgcgcaggtcgtgaagaactcacgggctgggttaggttagatctttggggttgtgtgtggtaagaagaggaggatttccagccggcatatgcggcctcgttcaactagagaaaatataaatgtaagactcgacggcaccttttcatcttttcattatttaaagaagaaaaaaagaagaagaagaagaagaagaacgggaaatgagcctcacctacgtgtttgttcctagtgttttctccccttcttagcaagagaccctttcaaaggttgtgcgtgatcgagatctctaatatgatcgaataatttagacttggatgtaaacggagcctggcaatttgcacaaataaacccagtgggttgatccgcttgtcttgcggcctttttcgcccgtttctgcttggccttgcccattttgagagttggtgactgctcggtgaggtccgaagagaacggacgaccagggatgtcagaggagtctccggcacccgtggacaaagaatccatgtcggtgcggagtctagtctcgacatattccctggaggcataatcgtcatcgtgcgaagacgttggggagcttagctcggaaagaggaattgtttcctctagaccatgtgaaatttctcgatcctcagcatcaatgtcatggctctccaaggaggcatctgataccacatcgacctccgaggcagcagaaaccttatattccccgacatcaacgtcgtcaagaggtttagttgcaactgcattggtacccgagtcatcagcagactccaaatccaattcatcattctgcattcgcatctcccagcatagctgtttgactgccttcaaatgcttcttgctacgttcgtgcgcctcgaattgcttctgacttttgaaatatttgtgacatgccacacattcaaaactctcgacttcgctctcttcgctcctctcctggtcgtcatctgccaccggttgctctgattgggcccactcggggaggacatgatcccgcatcctggcttgattcacagctcgtgaccttgcagcttgtgcagccacagactggcggagggtttcttggcgttgagcttcactttgggcgttgactttataccgcgggtcacgtttcttgacaaaggccacgagagacctgacagcatcgttaaattctcggatgccttcctcccgaagacgtctgttctccttttccatcattcgtcgtacccgacgatcaggcgcttcagaatagcgatgagcatctttccatgcgaatgatttttgggtggaaaatccggtccatgcagcatagaagggtcgcacaacggtctcaaaatcatcgtcaccagatccaaatgatggatattcaataggatcttgattctcccactgacaggccaatctttcttccaccacgagctgttcgaattgctctcgtaaaccaccaaagaatccggttggggagtcggagaattccatttgaggactgaacttcgaaaaaagtctgaggacatcttcagctgttgtaatccgaacattgtacgagtgttgatcgtcggtgtttccgttggtccctaaaaatgcatcgctatgggagtcgtaccatgcccgttcctggggatctgctagtacttcgtatgcagattggatttcggcgaacagcttagtagcctcgtcaacattcccgtaatttcgatctgggtgcaatataagagctttttttcgatatgcctttttgatcctaagagttcgttttagttatgtccgtaaccacatatccacatatccatatgaacttactcctcatctgttgcaccgcgtataacaccaagtagctcataatagtcggtcttctgctctgtctgttctgaagcgccagagctcgcctggctagtggaatgaaattggcccatggcgttcaaggatgaataccgcaataatcaccggttgtttttaaaggaacttagtaattcattccaagtaccccaagcaaatcattgggagcatagagcgagagtactgtctcaagtgtccataagcagaggaaaggaagaaaaaaaaaacattgcgatggaattcaagggcttggcgccttcgataacgaaagcggggagaaacattttctcaatgacttttgtattttcctgttctcctgttctcctgttcccctacatgatcccctgagtttctgatctacctttttaatttgcttctttaccttcaactaccgaggaatgtaaaccggttgttcttccgttttgattgccctctccgttggtcttctccaatatcgtcaatattcctccagggatggttcggtctttaagccatcttccagacgagatcctgaattcgattctacgttattcttctcctcagtcttgcgccgccgtcgaacaaaccaacagtcgatttaaaaacgtaacgaatgagcctttactatggcgtcaccattgccagtcgcattacaaattctgggatgggcgacatgatatgccccggaaacttgctcgcccagtgaattcaaccgattggaaggccctttttgtcttcaagtatcaggttgaccgatctgtcactcggcttcttgatagtattcttggtagccagatcggccggatcgagaagtttcgccgtgttatcaatatgggatacgatacaaaagatactcttctacgatatagcttgatagattctggagaggattatctggccagaaggtgggctactaattctatgcgagttggcatgtgtttccctcaagttgaccagtgccttgtgccaattacaaaaggtactatgcccacgcgctcttgacttgcctacaccgaaacattgcgataccagagtgggcgaaactcaaacgcggagaacccgtgtcactcgaccgagccttggcttgctttgatctctttatacccgaaagtggaactggggatttggatgaagtaggtgttatttcaagtcaaccccctcgacagatctatgcctaactctgatctagatacgagactctctggatgagatcctcggccgctttgtcgcatctcacccggatctttacctctccactcctcgtgagaaggcactggccgtagcatcctggctaacgctgaataatctcacggggatcgatccagagcgggaatatcattctttagagcataactttttaggactggctctaaagcatctagggcataactctctgccgttggtgtcagctgcgatatactgctttgttgcgcagggcgtgggcctgaacgcccatccctgtggatttccgttccatgtgcatgtgatcattacccctcagccgggctcagatatcaatggcaacgctttgagtggggtggggccagggaagcccctttacttggacccgtttcggggtgctagagagactgatgtctcaaatttgcgcagccagttaacatttttgggcatgtccaacacggaccagatcgcaactctgggtgaagcatccacttctggcgttatcttacgctgtggtaagaacatattgaactcgattcgtgtcgaaccccaaaattcgacctcgcgtgccacctccatagatgttgtgagcgcaaagtacgcagcactatggtctgtgatgctactgtcggacgattcgaggccgatggatctacgccatcagttgccatggctcatggaactgttcgctacggactttccttctgatatatttctagtcgagcagtacatcacacctttgtttcgtggcctgttcgagtatgagcatatactgaagagtcttcatgtgatgagggccatggatgaggtcccaaagaagattcggagacgaaccggtggtaatgcaaatatacaatacaaggtgggccagattttccgccatcgtcgctatcattatgaggctattatcacaggctgggactcggaatgtggcgcggacgaacagtggatgacgagaatgggcattgatcgattagaagctggcaggcatcaaagcttctatcatgtgctgtgtgtggttttgtacttgtatcctcttcttggctaatggctaattatggatatctagtgtggcggatcgaagtgcccggtacgtggctgaggaaaatattggcataattcggcctcgcttcacggaattgcctggaagcttgactgccattgcgggtaagcatttcaaacggtgggatgagcgggagaggatgtttgtgagcaacatgaaggatgaataccccgatgactagttcaaatcaaccccgctttatcgggctgctagctcggatagactcgtaaaaagcctagacttatggtaggctatataacgtattcggtaagcgagctgagcaccctaaccaaaacgcgtccatgaattagcacctagtcaattcaactacctaccgtgccactaaagtctaatacgcccccgatcgtctataaagtcaatagagcagtaggatcttattagctattgaggctttttaaaaataatttgttggagtgtggcagaactaggtaggcacaatgatttgtaatgcactctcgagcggtcaaatacgtagtgtttaaacagataaacagctaggcggtcaagtatcaggtcaaagatgagatcaaagtatatattctagaataaaatagtcaatttgtctaactagcctttttttaatacaatttagggctttattataacagttaaatatttgcagatagcttagtagtttaaagattagatgaattataacttcttctctagataaatcataacttttattatgattagtacttataggactcgtactttcctatttaggattatattattattcgttccttcctatttaaaggaacttatttatatagatagttataccttccttctaggggaagtaaggatagggctttatattgaacgaaagagaggctgtttacaatggtacgaacagtatatatactggaccaaaggggaaaatgagtgtatattataggaggagtgttctcctccaaggttatcctgctatatacttatataatcgcggcaagtggctactgactactaaatataataagaaatgtaaagaatgtacggaagtacgccatttctggtcgacactttatccctaaagggatatattgaacgaaggagaggctatttaacaatggtatatatagtatatatactagactaaagggataaaaataagtgtatattataggagaagcgttctcctctaaggttatcctactaggtgcttatataatcgcggtaagtggctattaactactaaatataataagaaatataaagaatatatagaagtatactatttctagtcgatatactctcctagaagctaccttatagctcctaatataattctactgctaagctatttatctatttataagatcccgaatatctactagtcctaaggattaggtaaacctcttataagtttatatagggagtagcttaataagcctatctactagtatattagctatagctacctactaaattaagatatagctagtattaacttcttagtatagctaatagttatagatatcgatatagtaaagctttatttataattatagttatttataagtaagtaaattaattatctatttattattataattaatagtaaggttagtctagtagttaaggttaactatataaagtaacctttcctactatattactaactttctaactttagagatagtaagtagtttagctttagtagttaatattattattatatattacttactagccttctaattaattactatactaaatagtttatataggaaaccttctaagcttttttaattagtataattactaaaggaagtattactagagaagtaaagtactaattaattatataaagggtagtacttaagagctagatattatatattatatagatattagattaagtaattaactactttataatacttagatcttagattaattaggaatttagctagataattagctacctttactatattaaggtaagtaataactataggataaaaggctaagttaagcttttattagtacttatagatctattcctttattataatccttacttaagatataatagctcccttaatctagtagtaatcttagggaaatactaaactccctaagaatcagccttaactagggaataaaataggaattacttctctaactactagaactaaataaatagaatcctagatttaagaaaatctaattaatcttcctaaagtaactatagaaactacctaatttatctaagaataaatctaggtctttaaagctaaagtagtactttaaaagagacttattactactaaagaacttattaaagtaaatagaagaaagcttaagagttactaaaaaggaaaggagttaaactaacctaagaataaaagtaatttaatattagagagtaaatatagttagaagggtaagattaaaagagatattataatatttaaaaagaaatatagtattaaaaatagagaaaactagctaaataaccttaataccctttttgannnnnnnnnnnnnnnnnnnnnnnnnnnnnnnnnnnnnnnnnnnnnnnnnnnnnnnnnnnnnnnnnnnnnnnnnnnnnnnnnnnnnnnnnnnnnnnnnnnnnnnnnnnnnnnnnnnnnnnnnnnnnnnnnnnnnnnnnnnnnnnnnnnnnnnnnnnnnnnnnnnnnnnnnnnnnnnnnnnnnnnnnnnnnnnnnnnnnnnnnnnnnnnnnnnnnnnnnnnnnnnnnnnnnnnnnnnnnnnnnnnnnnnnnnnnnnnnnnnnnnnnnnnnnnnnnnnnnnnnnnnnnnnnnnnnnnnnnnnnnnnnnnnnnnnnnnnnnnnnnnnnnnnnnnnnnnnnnnnnnnnnnnnnnnnnnnnnnnnnnnnnnnnnnnnnnnnnnnnnnnnnnnnnnnnnnnnnnnnnnnnnnnnnnnnnnnnnnnnnnnnnnnnnnnnnnnnnnnnnnnnnnnnnnnnnnnnnnnnnnnnnnnnnnnnnnnnnnnnnnnnnnnnnnnnnnnnnnnnnnnnnnnnnnnnnnnnnnnnnnnnnnnnnnnnnnnnnnnnnnnnnnnnnnnnnnnnnnnnnnnnnnnnnnnnnnnnnnnnnnnnnnnnnnnnnnnnnnnnnnnnnnnnnnnnnnnnnnnnnnnnnnnnnnnnnnnnnnnnnnnnnnnnnnnnnnnnnnnnnnnnnnnnnnnnnnnnnnnnnnnnnnnnnnnnnnnnnnnnnnnnnnnnnnnnnnnnnnnnnnnnnnnnnnnnnnnnnnnnnnnnnnnnnnnnnnnnnnnnnnnnnnnnnnnnnnnnnnnnnnnnnnnnnnnnnnnnnnnnnnnnnnnnnnnnnnnnnnnnnnnnnnnnnnnnnnnnnnnnnnnnnnnnnnnnnnnnnnnnnnnnnnnnnnnnnnnnnnnnnnnnnnnnnnnnnnnnnnnnnnnnnnnnnnnnnnnnnnnnnnnnnnnnnnnnnnnnnnnnnnnnnnnnnnnnnnnnnnnnnnnnnnnnnnnnnnnnnnnnnnnnnnnnnnnnnnnnnnnnnnnnnnnnnnnnnnnnnnnnnnnnnnnnnnnnnnnnnnnnnnnnnnnnnnnnnnnnnnnnnnnnnnnnnnnnnnnnnnnnnnnnnnnnnnnnnnnnnnnnnnnnnnnnnnnnnnnnnnnnnnnnnnnnnnnnnnnnnnnnnnnnnnnnnnnnnnnnnnnnnnnnnnnnnnnnnnnnnnnnnnnnnnnnnnnnnnnnnnnnnnnnnnnnnnnnnnnnnnnnnnnnnnnnnnnnnnnnnnnnnnnnnnnnnnnnnnnnnnnnnnnnnnnnnnnnnnnnnnnnnnnnnnnnnnnnnnnnnnnnnnnnnnnnnnnnnnnnnnnnnnnnnnnnnnnnnnnnnnnnnnnnnnnnnnnnnnnnnnnnnnnnnnnnnnnnnnnnnnnnnnnnnnnnnnnnnnnnnnnnnnnnnnnnnnnnnnnnnnnnnnnnnnnnnnnnnnnnnnnnnnnnnnnnnnnnnnnnnnnnnnnnnnnnnnnnnnnnnnnnnnnnnnnnnnnnnnnnnnnnnnnnnnnnnnnnnnnnnnnnnnnnnnnnnnnnnnnnnnnnnnnnnnnnnnnnnnnnnnnnnnnnnnnnnnnnnnnnnnnnnnnnnnnnnnnnnnnnnnnnnnnnnnnnnnnnnnnnnnnnnnnnnnnnnnnnnnnnnnnnnnnnnnnnnnnnnnnnnnnnnnnnnnnnnnnnnnnnnnnnnnnnnnnnnnnnnnnnnnnnnnnnnnnnnnnnnnnnnnnnnnnnnnnnnnnnnnnnnnnnnnnnnnnnnnnnnnnnnnnnnnnnnnnnnnnnnnnnnnnnnnnnnnnnnnnnnnnnnnnnnnnnnnnnnnnnnnnnnnnnnnnnnnnnnnnnnnnnnnnnnnnnnnnnnnnnnnnnnnnnnnnnnnnnnnnnnnnnnnnnnnnnnnnnnnnnnnnnnnnnnnnnnnnnnnnnnnnnnnnnnnnnnnnnnnnnnnnnnnnnnnnnnnnnnnnnnnnnnnnnnnnnnnnnnnnnnnnnnnnnnnnnnnnnnnnnnnnnnnnnnnnnnnnnnnnnnnnnnnnnnnnnnnnnnnnnnnnnnnnnnnnnnnnnnnnnnnnnnnnnnnnnnnnnnnnnnnnnnnnnnnnnnnnnnnnnnnnnnnnnnnnnnnnnnnnnnnnnnnnnnnnnnnnnnnnnnnnnnnnnnnnnnnnnnnnnnnnnnnnnnnnnnnnnnnnnnnnnnnnnnnnnnnnnnnnnnnnnnnnnnnnnnnnnnnnnnnnnnnnnnnnnnnnnnnnnnnnnnnnnnnnnnnnnnnnnnnnnnnnnnnnnnnnnnnnnnnnnnnnnnnnnnnnnnnnnnnnnnnnnnnnnnnnnnnnnnnnnnnnnnnnnnnnnnnnnnnnnnnnnnnnnnnnnnnnnnnnnnnnnnnnnnnnnnnnnnnnnnnnnnnnnnnnnnnnnnnnnnnnnnnnnnnnnnnnnnnnnnnnnnnnnnnnnnnnnnnnnnnnnnnnnnnnnnnnnnnnnnnnnnnnnnnnnnnnnnnnnnnnnnnnnnnnnnnnnnnnnnnnnnnnnnnnnnnnnnnnnnnnnnnnnnnnnnnnnnnnnnnnnnnnnnnnnnnnnnnnnnnnnnnnnnnnnnnnnnnnnnnnnnnnnnnnnnnnnnnnnnnnnnnnnnnnnnnnnnnnnnnnnnnnnnnnnnnnnnnnnnnnnnnnnnnnnnnnnnnnnnnnnnnnnnnnnnnnnnnnnnnnnnnnnnnnnnnnnnnnnnnnnnnnnnnnnnnnnnnnnnnnnnnnnnnnnnnnnnnnnnnnnnnnnnnnnnnnnnnnnnnnnnnnnnnnnnnnnnnnnnnnnnnnnnnnnnnnnnnnnnnnnnnnnnnnnnnnnnnnnnnnnnnnnnnnnnnnnnnnnnnnnnnnnnnnnnnnnnnnnnnnnnnnnnnnnnnnnnnnnnnnnnnnnnnnnnnnnnnnnnnnnnnnnnnnnnnnnnnnnnnnnnnnnnnnnnnnnnnnnnnnnnnnnnnnnnnnnnnnnnnnnnnnnnnnnnnnnnnnnnnnnnnnnnnnnnnnnnnnnnnnnnnnnnnnnnnnnnnnnnnnnnnnnnnnnnnnnnnnnnnnnnnnnnnnnnnnnnnnnnnnnnnnnnnnnnnnnnnnnnnnnnnnnnnnnnnnnnnnnnnnnnnnnnnnnnnnnnnnnnnnnnnnnnnnnnnnnnnnnnnnnnnnnnnnnnnnnnnnnnnnnnnnnnnnnnnnnnnnnnnnnnnnnnnnnnnnnnnnnnnnnnnnnnnnnnnnnnnnnnnnnnnnnnnnnnnnnnnnnnnnnnnnnnnnnnnnnnnnnnnnnnnnnnnnnnnnnnnnnnnnnnnnnnnnnnnnnnnnnnnnnnnnnnnnnnnnnnnnnnnnnnnnnnnnnnnnnnnnnnnnnnnnnnnnnnnnnnnnnnnnnnnnnnnnnnnnnnnnnnnnnnnnnnnnnnnnnnnnnnnnnnnnnnnnnnnnnnnnnnnnnnnnnnnnnnnnnnnnnnnnnnnnnnnnnnnnnnnnnnnnnnnnnnnnnnnnnnnnnnnnnnnnnnnnnnnnnnnnnnnnnnnnnnnnnnnnnnnnnnnnnnnnnnnnnnnnnnnnnnnnnnnnnnnnnnnnnnnnnnnnnnnnnnnnnnnnnnnnnnnnnnnnnnnnnnnnnnnnnnnnnnnnnnnnnnnnnnnnnnnnnnnnnnnnnnnnnnnnnnnnnnnnnnnnnnnnnnnnnnnnnnnnnnnnnnnnnnnnnnnnnnnnnnnnnnnnnnnnnnnnnnnnnnnnnnnnnnnnnnnnnnnnnnnnnnnnnnnnnnnnnnnnnnnnnnnnnnnnnnnnnnnnnnnnnnnnnnnnnnnnnnnnnnnnnnnnnnnnnnnnnnnnnnnnnnnnnnnnnnnnnnnnnnnnnnnnnnnnnnnnnnnnnnnnnnnnnnnnnnnnnnnnnnnnnnnnnnnnnnnnnnnnnnnnnnnnnnnnnnnnnnnnnnnnnnnnnnnnnnnnnnnnnnnnnnnnnnnnnnnnnnnnnnnnnnnnnnnnnnnnnnnnnnnnnnnnnnnnnnnnnnnnnnnnnnnnnnnnnnnnnnnnnnnnnnnnnnnnnnnnnnnnnnnnnnnnnnnnnnnnnnnnnnnnnnnnnnnnnnnnnnnnnnnnnnnnnnnnnnnnnnnnnnnnnnnnnnnnnnnnnnnnnnnnnnnnnnnnnnnnnnnnnnnnnnnnnnnnnnnnnnnnnnnnnnnnnnnnnnnnnnnnnnnnnnnnnnnnnnnnnnnnnnnnnnnnnnnnnnnnnnnnnnnnnnnnnnnnnnnnnnnnnnnnnnnnnnnnnnnnnnnnnnnnnnnnnnnnnnnnnnnnnnnnnnnnnnnnnnnnnnnnnnnnnnnnnnnnnnnnnnnnnnnnnnnnnnnnnnnnnnnnnnnnnnnnnnnnnnnnnnnnnnnnnnnnnnnnnnnnnnnnnnnnnnnnnnnnnnnnnnnnnnnnnnnnnnnnnnnnnnnnnnnnnnnnnnnnnnnnnnnnnnnnnnnnnnnnnnnnnnnnnnnnnnnnnnnnnnnnnnnnnnnnnnnnnnnnnnnnnnnnnnnnnnnnnnnnnnnnnnnnnnnnnnnnnnnnnnnnnnnnnnnnnnnnnnnnnnnnnnnnnnnnnnnnnnnnnnnnnnnnnnnnnnnnnnnnnnnnnnnnnnnnnnnnnnnnnnnnnnnnnnnnnnnnnnnnnnnnnnnnnnnnnnnnnnnnnnnnnnnnnnnnnnnnnnnnnnnnnnnnnnnnnnnnnnnnnnnnnnnnnnnnnnnnnnnnnnnnnnnnnnnnnnnnnnnnnnnnnnnnttaatagattagactatttagaattttagaatatattagaaagtaggtatactacctcctattcctagataaatatactataatttataatattttccctatctctttcctctaactataagaataaagagaagggaaactaaaataactactattattagaattagtagataataataaataggaggttaaagagtttaaagataactatatttttaaagataaattatattatctagttaaatagtaggactagccttctaaatataactaataggtcctagagaatataataattaatatactgaaacttattataaaatataaaaaggtataaaagatataaaagaaattaacctaagtaatatctatactaggttactattaaattattataactataatatctaattactataaggaaagatagttatatacttcttaagtattacctctatatctagattattaagtaattctactatcttagagtaaatttattagaataaaattatagtatctatctaagtaataagtaattcctctaaatttataagttaggattactctaaggcctatactataaagatatcttagggataaatagtagtataagtatcttagttacctataggatacttaataataaaggctatatagttattataaatagattaaaaagaaatattaataaaactattataaggaagattagatttatcttaatacttatagtaggaatatatatcctacttaaattatagtttttataatatattcttataagggtattaaaagctataattagattataaactatatctataactactttaataaacttagaagggaaaaggaactatacttctttattatccttatctaatatacctatagctactctaagggtccttctaattattaactaaaattactctatctaagaaagaactactagtaactagaaacaatttcccttannnnnnnnnnnnnnnnnnnnnnnnnnnnnnnnnnnnnnnnnnnnnnnnnnnnnnnnnnnnnnnnnnnnnnnnnnnnnnnnnnnnnnnnnnnnnnnnnnnnnnnnnnnnnnnnnnnnnnnnnnnnnnnnnnnnnnnnnnnnnnnnnnnnnnnnnnnnnnnnnnnnnnnnnnnnnnnnnnnnnnnnnnnnnnnnnnnnnnnnnnnnnnnnnnnnnnnnnnnnnnnnnnnnnnnnnnnnnnnnnnnnnnnnnnnnnnnnnnnnnnnnnnnnnnnnnnnnnnnnnnnnnnnnnnnnnnnnnnnnnnnnnnnnnnnnnnnnnnnnnnnnnnnnnnnnnnnnnnnnnnnnnnnnnnnnnnnnnnnnnnnnnnnnnnnnnnnnnnnnnnnnnnnnnnnnnnnnnnnnnnnnnnnnnnnnnnnnnnnnnnnnnnnnnnnnnnnnnnnnnnnnnnnnnnnnnnnnnnnnnnnnnnnnnnnnnnnnnnnnnnnnnnnnnnnnnnnnnnnnnnnnnnnnnnnnnnnnnnnnnnnnnnnnnnnnnnnnnnnnnnnnnnnnnnnnnnnnnnnnnnnnnnnnnnnnnnnnnnnnnnnnnnnnnnnnnnnnnnnnnnnnnnnnnnnnnnnnnnnnnnnnnnnnnnnnnnnnnnnnnnnnnnnnnnnnnnnnnnnnnnnnnnnnnnnnnnnnnnnnnnnnnnnnnnnnnnnnnnnnnnnnnnnnnnnnnnnnnnnnnnnnnnnnnnnnnnnnnnnnnnnnnnnnnnnnnnnnnnnnnnnnnnnnnnnnnnnnnnnnnnnnnnnnnnnnnnnnnnnnnnnnnnnnnnnnnnnnnnnnnnnnnnnnnnnnnnnnnnnnnnnnnnnnnnnnnnnnnnnnnnnnnnnnnnnnnnnnnnnnnnnnnnnnnnnnnnnnnnnnnnnnnnnnnnnnnnnnnnnnnnnnnnnnnnnnnnnnnnnnnnnnnnnnnnnnnnnnnnnnnnnnnnnnnnnnnnnnnnnnnnnnnnnnnnnnnnnnnnnnnnnnnnnnnnnnnnnnnnnnnnnnnnnnnnnnnnnnnnnnnnnnnnnnnnnnnnnnnnnnnnnnnnnnnnnnnnnnnnnnnnnnnnnnnnnnnnnnnnnnnnnnnnnnnnnnnnnnnnnnnnnnnnnnnnnnnnnnnnnnnnnnnnnnnnnnnnnnnnnnnnnnnnnnnnnnnnnnnnnnnnnnnnnnnnnnnnnnnnnnnnnnnnnnnnnnnnnnnnnnnnnnnnnnnnnnnnnnnnnnnnnnnnnnnnnnnnnnnnnnnnnnnnnnnnnnnnnnnnnnnnnnnnnnnnnnnnnnnnnnnnnnnnnnnnnnnnnnnnnnnnnnnnnnnnnnnnnnnnnnnnnnnnnnnnnnnnnnnnnnnnnnnnnnnnnnnnnnnnnnnnnnnnnnnnnnnnnnnnnnnnnnnnnnnnnnnnnnnnnnnnnnnnnnnnnnnnnnnnnnnnnnnnnnnnnnnnnnnnnnnnnnnnnnnnnnnnnnnnnnnnnnnnnnnnnnnnnnnnnnnnnnnnnnnnnnnnnnnnnnnnnnnnnnnnnnnnnnnnnnnnnnnnnnnnnnnnnnnnnnnnnnnnnnnnnnnnnnnnnnnnnnnnnnnnnnnnnnnnnnnnnnnnnnnnnnnnnnnnnnnnnnnnnnnnnnnnnnnnnnnnnnnnnnnnnnnnnnnnnnnnnnnnnnnnnnnnnnnnnnnnnnnnnnnnnnnnnnnnnnnnnnnnnnnnnnnnnnnnnnnnnnnnnnnnnnnnnnnnnnnnnnnnnnnnnnnnnnnnnnnnnnnnnnnnnnnnnnnnnnnnnnnnnnnnnnnnnnnnnnnnnnnnnnnnnnnnnnnnnnnnnnnnnnnnnnnnnnnnnnnnnnnnnnnnnnnnnnnnnnnnnnnnnnnnnnnnnnnnnnnnnnnnnnnnnnnnnnnnnnnnnnnnnnnnnnnnnnnnnnnnnnnnnnnnnnnnnnnnnnnnnnnnnnnnnnnnnnnnnnnnnnnnnnnnnnnnnnnnnnnnnnnnnnnnnnnnnnnnnnnnnnnnnnnnnnnnnnnnnnnnnnnnnnnnnnnnnnnnnnnnnnnnnnnnnnnnnnnnnnnnnnnnnnnnnnnnnnnnnnnnnnnnnnnnnnnnnnnnnnnnnnnnnnnnnnnnnnnnnnnnnnnnnnnnnnnnnnnnnnnnnnnnnnnnnnnnnnnnnnnnnnnnnnnnnnnnnnnnnnnnnnnnnnnnnnnnnnnnnnnnnnnnnnnnnnnnnnnnnnnnnnnnnnnnnnnnnnnnnnnnnnnnnnnnnnnnnnnnnnnnnnnnnnnnnnnnnnnnnnnnnnnnnnnnnnnnnnnnnnnnnnnnnnnnnnnnnnnnnnnnnnnnnnnnnnnnnnnnnnnnnnnnnnnnnnnnnnnnnnnnnnnnnnnnnnnnnnnnnnnnnnnnnnnnnnnnnnnnnnnnnnnnnnnnnnnnnnnnnnnnnnnnnnnnnnnnnnnnnnnnnnnnnnnnnnnnnnnnnnnnnnnnnnnnnnnnnnnnnnnnnnnnnnnnnnnnnnnnnnnnnnnnnnnnnnnnnnnnnnnnnnnnnnnnnnnnnnnnnnnnnnnnnnnnnnnnnnnnnnnnnnnnnnnnnnnnnnnnnnnnnnnnnnnnnnnnnnnnnnnnnnnnnnnnnnnnnnnnnnnnnnnnnnnnnnnnnnnnnnnnnnnnnnnnnnnnnnnnnnnnnnnnnnnnnnnnnnnnnnnnnnnnnnnnnnnnnnnnnnnnnnnnnnnnnnnnnnnnnnnnnnnnnnnnnnnnnnnnnnnnnnnnnnnnnnnnnnnnnnnnnnnnnnnnnnnnnnnnnnnnnnnnnnnnnnnnnnnnnnnnnnnnnnnnnnnnnnnnnnnnnnnnnnnnnnnnnnnnnnnnnnnnnnnnnnnnnnnnnnnnnnnnnnnnnnnnnnnnnnnnnnnnnnnnnnnnnnnnnnnnnnnnnnnnnnnnnnnnnnnnnnnnnnnnnnnnnnnnnnnnnnnnnnnnnnnnnnnnnnnnnnnnnnnnnnnnnnnnnnnnnnnnnnnnnnnnnnnnnnnnnnnnnnnnnnnnnnnnnnnnnnnnnnnnnnnnnnnnnnnnnnnnnnnnnnnnnnnnnnnnnnnnnnnnnnnnnnnnnnnnnnnnnnnnnnnnnnnnnnnnnnnnnnnnnnnnnnnnnnnnnnnnnnnnnnnnnnnnnnnnnnnnnnnnnnnnnnnnnnnnnnnnnnnnnnnnnnnnnnnnnnnnnnnnnnnnnnnnnnnnnnnnnnnnnnnnnnnnnnnnnnnnnnnnnnnnnnnnnnnnnnnnnnnnnnnnnnnnnnnnnnnnnnnnnnnnnnnnnnnnnnnnnnnnnnnnnnnnnnnnnnnnnnnnnnnnnnnnnnnnnnnnnnnnnnnnnnnnnnnnnnnnnnnnnnnnnnnnnnnnnnnnnnnnnnnnnnnnnnnnnnnnnnnnnnnnnnnnnnnnnnnnnnnnnnnnnnnnnnnnnnnnnnnnnnnnnnnnnnnnnnnnnnnnnnnnnnnnnnnnnnnnnnnnnnnnnnnnnnnnnnnnnnnnnnnnnnnnnnnnnnnnnnnnnnnnnnnnnnnnnnnnnnnnnnnnnnnnnnnnnnnnnnnnnnnnnnnnnnnnnnnnnnnnnnnnnnnnnnnnnnnnnnnnnnnnnnnnnnnnnnnnnnnnnnnnnnnnnnnnnnnnnnnnnnnnnnnnnnnnnnnnnnnnnnnnnnnnnnnnnnnnnnnnnnnnnnnnnnnnnnnnnnnnnnnnnnnnnnnnnnnnnnnnnnnnnnnnnnnnnnnnnnnnnnnnnnnnnnnnnnnnnnnnnnnnnnnnnnnnnnnnnnnnnnnnnnnnnnnnnnnnnnnnnnnnnnnnnnnnnnnnnnnnnnnnnnnnnnnnnnnnnnnnnnnnnnnnnnnnnnnnnnnnnnnnnnnnnnnnnnnnnnnnnnnnnnnnnnnnnnnnnnnnnnnnnnnnnnnnnnnnnnnnnnnnnnnnnnnnnnnnnnnnnnnnnnnnnnnnnnnnnnnnnnnnnnnnnnnnnnnnnnnnnnnnnnnnnnnnnnnnnnnnnnnnnnnnnnnnnnnnnnnnnnnnnnnnnnnnnnnnnnnnnnnnnnnnnnnnnnnnnnnnnnnnnnnnnnnnnnnnnnnnnnnnnnnnnnnnnnnnnnnnnnnnnnnnnnnnnnnnnnnnnnnnnnnnnnnnnnnnnnnnnnnnnnnnnnnnnnnnnnnnnnnnnnnnnnnnnnnnnnnnnnnnnnnnnnnnnnnnnnnnnnnnnnnnnnnnnnnnnnnnnnnnnnnnnnnnnnnnnnnnnnnnnnnnnnnnnnnnnnnnnnnnnnnnnnnnnnnnnnnnnnnnnnnnnnnnnnnnnnnnnnnnnnnnnnnnnnnnnnnnnnnnnnnnnnnnnnnnnnnnnnnnnnnnnnnnnnnnnnnnnnnnnnnnnnnnnnnnnnnnnnnnnnnnnnnnnnnnnnnnnnnnnnnnnnnnnnnnnnnnnnnnnnnnnnnnnnnnnnnnnnnnnnnnnnnnnnnnnnnnnnnnnnnnnnnnnnnnnnnnnnnnnnnnnnnnnnnnnnnnnnnnnnnnnnnnnnnnnnnnnnnnnnnnnnnnnnnnnnnnnnnnnnnnnnnnnnnnnnnnnnnnnnnnnnnnnnnnnnnnnnnnnnnnnnnnnnnnnnnnnnnnnnnnnnnnnnnnnnnnnnnnnnnnnnnnnnnnnnnnnnnnnnnnnnnnnnnnnnnnnnnnnnnnnnnnnnnnnnnnnnnnnnnnnnnnnnnnnnnnnnnnnnnnnnnnnnnnnnnnnnnnnnnnnnnnnnnnnnnnnnnnnnnnnnnnnnnnnnnnnnnnnnnnnnnnnnnnnnnnnnnnnnnnnnnnnnnnnnnnnnnnnnnnnnnnnnnnnnnnnnnnnnnnnnnnnnnnnnnnnnnnnnnnnnnnnnnnnnnnnnnnnnnnnnnnnnnnnnnnnnnnnnnnnnnnnnnnnnnnnnnnnnnnnnnnnnnnnnnnnnnnnnnnnnnnnnnnnnnnnnnnnnnnnnnnnnnnnnnnnnnnnnnnnnnnnnnnnnnnnnnnnnnnnnnnnnnnnnnnnnnnnnnnnnnnnnnnnnnnnnnnnnnnnnnnnnnnnnnnnnnnnnnnnnnnnnnnnnnnnnnnnnnnnnnnnnnnnnnnnnnnnnnnnnnnnnnnnnnnnnnnnnnnnnnnnnnnnnnnnnnnnnnnnnnnnnnnnnnnnnnnnnnnnnnnnnnnnnnnnnnnnnnnnnnnnnnnnnnnnnnnnnnnnnnnnnnnnnnnnnnnnnnnnnnnnnnnnnnnnnnnnnnnnnnnnnnnnnnnnnnnnnnnnnnnnnnnnnnnnnnnnnnnnnnnnnnnnnnnnnnnnnnnnnnnnnnnnnnnnnnnnnnnnnnnnnnnnnnnnnnnnnnnnnnnnnnnnnnnnnnnnnnnnnnnnnnnnnnnnnnnnnnnnnnnnnnnnnnnnnnnnnnnnnnnnnnnnnnnnnnnnnnnnnnnnnnnnnnnnnnnnnnnnnnnnnnnnnnnnnnnnnnnnnnnnnnnnnnnnnnnnnnnnnnnnnnnnnnnnnnnnnnnnnnnnnnnnnnnnnnnnnnnnnnnnnnnnnnnnnnnnnnnnnnnnnnnnnnnnnnnnnnnnnnnnnnnnnnnnnnnnnnnnnnnnnnnnnnnnnnnnnnnnnnnnnnnnnnnnnnnnnnnnnnnnnnnnnnnnnnnnnnnnnnnnnnnnnnnnnnnnnnnnnnnnnnnnnnnnnnnnnnnnnnnnnnnnnnnnnnnnnnnnnnnnnnnnnnnnnnnnnnnnnnnnnnnnnnnnnnnnnnnnnnnnnnnnnnnnnnnnnnnnnnnnnnnnnnnnnnnnnnnnnnnnnnnnnnnnnnnnnnnnnnnnnnnnnnnnnnnnnnnnnnnnnnnnnnnnnnnnnnnnnnnnnnnnnnnnnnnnnnnnnnnnnnnnnnnnnnnnnnnnnnnnnnnnnnnnnnnnnnnnnnnnnnnnnnnnnnnnnnnnnnnnnnnnnnnnnnnnnnnnnnnnnnnnnnnnnnnnnnnnnnnnnnnnnnnnnnnnnnnnnnnnnnnnnnnnnnnnnnnnnnnnnnnnnnnnnnnnnnnnnnnnnnnnnnnnnnnnnnnnnnnnnnnnnnnnnnnnnnnnnnnnnnnnnnnnnnnnnnnnnnnnnnnnnnnnnnnnnnnnnnnnnnnnnnnnnnnnnnnnnnnnnnnnnnnnnnnnnnnnnnnnnnnnnnnnnnnnnnnnnnnnnnnnnnnnnnnnnnnnnnnnnnnnnnnnnnnnnnnnnnnnnnnnnnnnnnnnnnnnnnnnnnnnnnnnnnnnnnnnnnnnnnnnnnnnnnnnnnnnnnnnnnnnnnnnnnnnnnnnnnnnnnnnnnnnnnnnnnnnnnnnnnnnnnnnnnnnnnnnnnnnnnnnnnnnnnnnnnnnnnnnnnnnnnnnnnnnnnnnnnnnnnnnnnnnnnnnnnnnnnnnnnnnnnnnnnnnnnnnnnnnnnnnnnnnnnnnnnnnnnnnnnnnnnnnnnnnnnnnnnnnnnnnnnnnnnnnnnnnnnnnnnnnnnnnnnnnnnnnnnnnnnnnnnnnnnnnnnnnnnnnnnnnnnnnnnnnnnnnnnnnnnnnnnnnnnnnnnnnnnnnnnnnnnnnnnnnnnnnnnnnnnnnnnnnnnnnnnnnnnnnnnnnnnnnnnnnnnnnnnnnnnnnnnnnnnnnnnnnnnnnnnnnnnnnnnnnnnnnnnnnnnnnnnnnnnnnnnnnnnnnnnnnnnnnnnnnnnnnnnnnnnnnnnnnnnnnnnnnnnnnnnnnnnnnnnnnnnnnnnnnnnnnnnnnnnnnnnnnnnnnnnnnnnnnnnnnnnnnnnnnnnnnnnnnnnnnnnnnnnnnnnnnnnnnnnnnnnnnnnnnnnnnnnnnnnnnnnnnnnnnnnnnnnnnnnnnnnnnnnnnnnnnnnnnnnnnnnnnnnnnnnnnnnnnnnnnnnnnnnnnnnnnnnnnnnnnnnnnnnnnnnnnnnnnnnnnnnnnnnnnnnnnnnnnnnnnnnnnnnnnnnnnnnnnnnnnnnnnnnnnnnnnnnnnnnnnnnnnnnnnnnnnnnnnnnnnnnnnnnnnnnnnnnnnnnnnnnnnnnnnnnnnnnnnnnnnnnnnnnnnnnnnnnnnnnnnnnnnnnnnnnnnnnnnnnnnnnnnnnnnnnnnnnnnnnnnnnnnnnnnnnnnnnnnnnnnnnnnnnnnnnnnnnnnnnnnnnnnnnnnnnnnnnnnnnnnnnnnnnnnnnnnnnnnnnnnnnnnnnnnnnnnnnnnnnnnnnnnnnnnnnnnnnnnnnnnnnnnnnnnnnnnnnnnnnnnnnnnnnnnnnnnnnnnnnnnnnnnnnnnnnnnnnnnnnnnnnnnnnnnnnnnnnnnnnnnnnnnnnnnnnnnnnnnnnnnnnnnnnnnnnnnnnnnnnnnnnnnnnnnnnnnnnnnnnnnnnnnnnnnnnnnnnnnnnnnnnnnnnnnnnnnnnnnnnnnnnnnnnnnnnnnnnnnnnnnnnnnnnnnnnnnnnnnnnnnnnnnnnnnnnnnnnnnnnnnnnnnnnnnnnnnnnnnnnnnnnnnnnnnnnnnnnnnnnnnnnnnnnnnnnnnnnnnnnnnnnnnnnnnnnnnnnnnnnnnnnnnnnnnnnnnnnnnnnnnnnnnnnnnnnnnnnnnnnnnnnnnnnnnnnnnnnnnnnnnnnnnnnnnnnnnnnnnnnnnnnnnnnnnnnnnnnnnnnnnnnnnnnnnnnnnnnnnnnnnnnnnnnnnnnnnnnnnnnnnnnnnnnnnnnnnnnnnnnnnnnnnnnnnnnnnnnnnnnnnnnnnnnnnnnnnnnnnnnnnnnnnnnnnnnnnnnnnnnnnnnnnnnnnnnnnnnnnnnnnnnnnnnnnnnnnnnnnnnnnnnnnnnnnnnnnnnnnnnnnnnnnnnnnnnnnnnnnnnnnnnnnnnnnnnnnnnnnnnnnnnnnnnnnnnnnnnnnnnnnnnnnnnnnnnnnnnnnnnnnnnnnnnnnnnnnnnnnnnnnnnnnnnnnnnnnnnnnnnnnnnnnnnnnnnnnnnnnnnnnnnnnnnnnnnnnnnnnnnnnnnnnnnnnnnnnnnnnnnnnnnnnnnnnnnnnnnnnnnnnnnnnnnnnnnnnnnnnnnnnnnnnnnnnnnnnnnnnnnnnnnnnnnnnnnnnnnnnnnnnnnnnnnnnnnnnnnnnnnnnnnnnnnnnnnnnnnnnnnnnnnnnnnnnnnnnnnnnnnnnnnnnnnnnnnnnnnnnnnnnnnnnnnnnnnnnnnnnnnnnnnnnnnnnnnnnnnnnnnnnnnnnnnnnnnnnnnnnnnnnnnnnnnnnnnnnnnnnnnnnnnnnnnnnnnnnnnnnnnnnnnnnnnnnnnnnnnnnnnnnnnnnnnnnnnnnnnnnnnnnnnnnnnnnnnnnnnnnnnnnnnnnnnnnnnnnnnnnnnnnnnnnnnnnnnnnnnnnnnnnnnnnnnnnnnnnnnnnnnnnnnnnnnnnnnnnnnnnnnnnnnnnnnnnnnnnnnnnnnnnnnnnnnnnnnnnnnnnnnnnnnnnnnnnnnnnnnnnnnnnnnnnnnnnnnnnnnnnnnnnnnnnnnnnnnnnnnnnnnnnnnnnnnnnnnnnnnnnnnnnnnnnnnnnnnnnnnnnnnnnnnnnnnnnnnnnnnnnnnnnnnnnnnnnnnnnnnnnnnnnnnnnnnnnnnnnnnnnnnnnnnnnnnnnnnnnnnnnnnnnnnnnnnnnnnnnnnnnnnnnnnnnnnnnnnnnnnnnnnnnnnnnnnnnnnnnnnnnnnnnnnnnnnnnnnnnnnnnnnnnnnnnnnnnnnnnnnnnnnnnnnnnnnnnnnnnnnnnnnnnnnnnnnnnnnnnnnnnnnnnnnnnnnnnnnnnnnnnnnnnnnnnnnnnnnnnnnnnnnnnnnnnnnnnnnnnnnnnnnnnnnnnnnnnnnnnnnnnnnnnnnnnnnnnnnnnnnnnnnnnnnnnnnnnnnnnnnnnnnnnnnnnnnnnnnnnnnnnnnnnnnnnnnnnnnnnnnnnnnnnnnnnnnnnnnnnnnnnnnnnnnnnnnnnnnnnnnnnnnnnnnnnnnnnnnnnnnnnnnnnnnnnnnnnnnnnnnnnnnnnnnnnnnnnnnnnnnnnnnnnnnnnnnnnnnnnnnnnnnnnnnnnnnnnnnnnnnnnnnnnnnnnnnnnnnnnnnnnnnnnnnnnnnnnnnnnnnnnnnnnnnnnnnnnnnnnnnnnnnnnnnnnnnnnnnnnnnnnnnnnnnnnnnnnnnnnnnnnnnnnnnnnnnnnnnnnnnnnnnnnnnnnnnnnnnnnnnnnnnnnnnnnnnnnnnnnnnnnnnnnnnnnnnnnnnnnnnnnnnnnnnnnnnnnnnnnnnnnnnnnnnnnnnnnnnnnnnnnnnnnnnnnnnnnnnnnnnnnnnnnnnnnnnnnnnnnnnnnnnnnnnnnnnnnnnnnnnnnnnnnnnnnnnnnnnnnnnnnnnnnnnnnnnnnnnnnnnnnnnnnnnnnnnnnnnnnnnnnnnnnnnnnnnnnnnnnnnnnnnnnnnnnnnnnnnnnnnnnnnnnnnnnnnnnnnnnnnnnnnnnnnnnnnnnnnnnnnnnnnnnnnnnnnnnnnnnnnnnnnnnnnnnnnnnnnnnnnnnnnnnnnnnnnnnnnnnnnnnnnnnnnnnnnnnnnnnnnnnnnnnnnnnnnnnnnnnnnnnnnnnnnnnnnnnnnnnnnnnnnnnnnnnnnnnnnnnnnnnnnnnnnnnnnnnnnnnnnnnnnnnnnnnnnnnnnnnnnnnnnnnnnnnnnnnnnnnnnnnnnnnnnnnnnnnnnnnnnnnnnnnnnnnnnnnnnnnnnnnnnnnnnnnnnnnnnnnnnnnnnnnnnnnnnnnnnnnnnnnnnnnnnnnnnnnnnnnnnnnnnnnnnnnnnnnnnnnnnnnnnnnnnnnnnnnnnnnnnnnnnnnnnnnnnnnnnnnnnnnnnnnnnnnnnnnnnnnnnnnnnnnnnnnnnnnnnnnnnnnnnnnnnnnnnnnnnnnnnnnnnnnnnnnnnnnnnnnnnnnnnnnnnnnnnnnnnnnnnnnnnnnnnnnnnnnnnnnnnnnnnnnnnnnnnnnnnnnnnnnnnnnnnnnnnnnnnnnnnnnnnnnnnnnnnnnnnnnnnnnnnnnnnnnnnnnnnnnnnnnnnnnnnnnnnnnnnnnnnnnnnnnnnnnnnnnnnnnnnnnnnnnnnnnnnnnnnnnnnnnnnnnnnnnnnnnnnnnnnnnnnnnnnnnnnnnnnnnnnnnnnnnnnnnnnnnnnnnnnnnnnnnnnnnnnnnnnnnnnnnnnnnnnnnnnnnnnnnnnnnnnnnnnnnnnnnnnnnnnnnnnnnnnnnnnnnnnnnnnnnnnnnnnnnnnnnnnnnnnnnnnnnnnnnnnnnnnnnnnnnnnnnnnnnnnnnnnnnnnnnnnnnnnnnnnnnnnnnnnnnnnnnnnnnnnnnnnnnnnnnnnnnnnnnnnnnnnnnnnnnnnnnnnnnnnnnnnnnnnnnnnnnnnnnnnnnnnnnnnnnnnnnnnnnnnnnnnnnnnnnnnnnnnnnnnnnnnnnnnnnnnnnnnnnnnnnnnnnnnnnnnnnnnnnnnnnnnnnnnnnnnnnnnnnnnnnnnnnnnnnnnnnnnnnnnnnnnnnnnnnnnnnnnnnnnnnnnnnnnnnnnnnnnnnnnnnnnnnnnnnnnnnnnnnnnnnnnnnnnnnnnnnnnnnnnnnnnnnnnnnnnnnnnnnnnnnnnnnnnnnnnnnnnnnnnnnnnnnnnnnnnnnnnnnnnnnnnnnnnnnnnnnnnnnnnnnnnnnnnnnnnnnnnnnnnnnnnnnnnnnnnnnnnnnnnnnnnnnnnnnnnnnnnnnnnnnnnnnnnnnnnnnnnnnnnnnnnnnnnnnnnnnnnnnnnnnnnnnnnnnnnnnnnnnnnnnnnnnnnnnnnnnnnnnnnnnnnnnnnnnnnnnnnnnnnnnnnnnnnnnnnnnnnnnnnnnnnnnnnnnnnnnnnnnnnnnnnnnnnnnnnnnnnnnnnnnnnnnnnnnnnnnnnnnnnnnnnnnnnnnnnnnnnnnnnnnnnnnnnnnnnnnnnnnnnnnnnnnnnnnnnnnnnnnnnnnnnnnnnnnnnnnnnnnnnnnnnnnnnnnnnnnnnnnnnnnnnnnnnnnnnnnnnnnnnnnnnnnnnnnnnnnnnnnnnnnnnnnnnnnnnnnnnnnnnnnnnnnnnnnnnnnnnnnnnnnnnnnnnnnnnnnnnnnnnnnnnnnnnnnnnnnnnnnnnnnnnnnnnnnnnnnnnnnnnnnnnnnnnnnnnnnnnnnnnnnnnnnnnnnnnnnnnnnnnnnnnnnnnnnnnnnnnnnnnnnnnnnnnnnnnnnnnnnnnnnnnnnnnnnnnnnnnnnnnnnnnnnnnnnnnnnnnnnnnnnnnnnnnnnnnnnnnnnnnnnnnnnnnnnnnnnnnnnnnnnnnnnnnnnnnnnnnnnnnnnnnnnnnnnnnnnnnnnnnnnnnnnnnnnnnnnnnnnnnnnnnnnnnnnnnnnnnnnnnnnnnnnnnnnnnnnnnnnnnnnnnnnnnnnnnnnnnnnnnnnnnnnnnnnnnnnnnnnnnnnnnnnnnnnnnnnnnnnnnnnnnnnnnnnnnnnnnnnnnnnnnnnnnnnnnnnnnnnnnnnnnnnnnnnnnnnnnnnnnnnnnnnnnnnnnnnnnnnnnnnnnnnnnnnnnnnnnnnnnnnnnnnnnnnnnnnnnnnnnnnnnnnnnnnnnnnnnnnnnnnnnnnnnnnnnnnnnnnnnnnnnnnnnnnnnnnnnnnnnnnnnnnnnnnnnnnnnnnnnnnnnnnnnnnnnnnnnnnnnnnnnnnnnnnnnnnnnnnnnnnnnnnnnnnnnnnnnnnnnnnnnnnnnnnnnnnnnnnnnnnnnnnnnnnnnnnnnnnnnnnnnnnnnnnnnnnnnnnnnnnnnnnnnnnnnnnnnnnnnnnnnnnnnnnnnnnnnnnnnnnnnnnnnnnnnnnnnnnnnnnnnnnnnnnnnnnnnnnnnnnnnnnnnnnnnnnnnnnnnnnnnnnnnnnnnnnnnnnnnnnnnnnnnnnnnnnnnnnnnnnnnnnnnnnnnnnnnnnnnnnnnnnnnnnnnnnnnnnnnnnnnnnnnnnnnnnnnnnnnnnnnnnnnnnnnnnnnnnnnnnnnnnnnnnnnnnnnnnnnnnnnnnnnnnnnnnnnnnnnnnnnnnnnnnnnnnnnnnnnnnnnnnnnnnnnnnnnnnnnnnnnnnnnnnnnnnnnnnnnnnnnnnnnnnnnnnnnnnnnnnnnnnnnnnnnnnnnnnnnnnnnnnnnnnnnnnnnnnnnnnnnnnnnnnnnnnnnnnnnnnnnnnnnnnnnnnnnnnnnnnnnnnnnnnnnnnnnnnnnnnnnnnnnnnnnnnnnnnnnnnnnnnnnnnnnnnnnnnnnnnnnnnnnnnnnnnnnnnnnnnnnnnnnnnnnnnnnnnnnnnnnnnnnnnnnnnnnnnnnnnnnnnnnnnnnnnnnnnnnnnnnnnnnnnnnnnnnnnnnnnnnnnnnnnnnnnnnnnnnnnnnnnnnnnnnnnnnnnnnnnnnnnnnnnnnnnnnnnnnnnnnnnnnnnnnnnnnnnnnnnnnnnnnnnnnnnnnnnnnnnnnnnnnnnnnnnnnnnnnnnnnnnnnnnnnnnnnnnnnnnnnnnnnnnnnnnnnnnnnnnnnnnnnnnnnnnnnnnnnnnnnnnnnnnnnnnnnnnnnnnnnnnnnnnnnnnnnnnnnnnnnnnnnnnnnnnnnnnnnnnnnnnnnnnnnnnnnnnnnnnnnnnnnnnnnnnnnnnnnnnnnnnnnnnnnnnnnnnnnnnnnnnnnnnnnnnnnnnnnnnnnnnnnnnnnnnnnnnnnnnnnnnnnnnnnnnnnnnnnnnnnnnnnnnnnnnnnnnnnnnnnnnnnnnnnnnnnnnnnnnnnnnnnnnnnnnnnnnnnnnnnnnnnnnnnnnnnnnnnnnnnnnnnnnnnnnnnnnnnnnnnnnnnnnnnnnnnnnnnnnnnnnnnnnnnnnnnnnnnnnnnnnnnnnnnnnnnnnnnnnnnnnnnnnnnnnnnnnnnnnnnnnnnnnnnnnnnnnnnnnnnnnnnnnnnnnnnnnnnnnnnnnnnnnnnnnnnnnnnnnnnnnnnnnnnnnnnnnnnnnnnnnnnnnnnnnnnnnnnnnnnnnnnnnnnnnnnnnnnnnnnnnnnnnnnnnnnnnnnnnnnnnnnnnnnnnnnnnnnnnnnnnnnnnnnnnnnnnnnnnnnnnnnnnnnnnnnnnnnnnnnnnnnnnnnnnnnnnnnnnnnnnnnnnnnnnnnnnnnnnnnnnnnnnnnnnnnnnnnnnnnnnnnnnnnnnnnnnnnnnnnnnnnnnnnnnnnnnnnnnnnnnnnnnnnnnnnnnnnnnnnnnnnnnnnnnnnnnnnnnnnnnnnnnnnnnnnnnnnnnnnnnnnnnnnnnnnnnnnnnnnnnnnnnnnnnnnnnnnnnnnnnnnnnnnnnnnnnnnnnnnnnnnnnnnnnnnnnnnnnnnnnnnnnnnnnnnnnnnnnnnnnnnnnnnnnnnnnnnnnnnnnnnnnnnnnnnnnnnnnnnnnnnnnnnnnnnnnnnnnnnnnnnnnnnnnnnnnnnnnnnnnnnnnnnnnnnnnnnnnnnnnnnnnnnnnnnnnnnnnnnnnnnnnnnnnnnnnnnnnnnnnnnnnnnnnnnnnnnnnnnnnnnnnnnnnnnnnnnnnnnnnnnnnnnnnnnnnnnnnnnnnnnnnnnnnnnnnnnnnnnnnnnnnnnnnnnnnnnnnnnnnnnnnnnnnnnnnnnnnnnnnnnnnnnnnnnnnnnnnnnnnnnnnnnnnnnnnnnnnnnnnnnnnnnnnnnnnnnnnnnnnnnnnnnnnnnnnnnnnnnnnnnnnnnnnnnnnnnnnnnnnnnnnnnnnnnnnnnnnnnnnnnnnnnnnnnnnnnnnnnnnnnnnnnnnnnnnnnnnnnnnnnnnnnnnnnnnnnnnnnnnnnnnnnnnnnnnnnnnnnnnnnnnnnnnnnnnnnnnnnnnnnnnnnnnnnnnnnnnnnnnnnnnnnnnnnnnnnnnnnnnnnnnnnnnnnnnnnnnnnnnnnnnnnnnnnnnnnnnnnnnnnnnnnnnnnnnnnnnnnnnnnnnnnnnnnnnnnnnnnnnnnnnnnnnnnnnnnnnnnnnnnnnnnnnnnnnnnnnnnnnnnnnnnnnnnnnnnnnnnnnnnnnnnnnnnnnnnnnnnnnnnnnnnnnnnnnnnnnnnnnnnnnnnnnnnnnnnnnnnnnnnnnnnnnnnnnnnnnnnnnnnnnnnnnnnnnnnnnnnnnnnnnnnnnnnnnnnnnnnnnnnnnnnnnnnnnnnnnnnnnnnnnnnnnnnnnnnnnnnnnnnnnnnnnnnnnnnnnnnnnnnnnnnnnnnnnnnnnnnnnnnnnnnnnnnnnnnnnnnnnnnnnnnnnnnnnnnnnnnnnnnnnnnnnnnnnnnnnnnnnnnnnnnnnnnnnnnnnnnnnnnnnnnnnnnnnnnnnnnnnnnnnnnnnnnnnnnnnnnnnnnnnnnnnnnnnnnnnnnnnnnnnnnnnnnnnnnnnnnnnnnnnnnnnnnnnnnnnnnnnnnnnnnnnnnnnnnnnnnnnnnnnnnnnnnnnnnnnnnnnnnnnnnnnnnnnnnnnnnnnnnnnnnnnnnnnnnnnnnnnnnnnnnnnnnnnnnnnnnnnnnnnnnnnnnnnnnnnnnnnnnnnnnnnnnnnnnnnnnnnnnnnnnnnnnnnnnnnnnnnnnnnnnnnnnnnnnnnnnnnnnnnnnnnnnnnnnnnnnnnnnnnnnnnnnnnnnnnnnnnnnnnnnnnnnnnnnnnnnnnnnnnnnnnnnnnnnnnnnnnnnnnnnnnnnnnnnnnnnnnnnnnnnnnnnnnnnnnnnnnnnnnnnnnnnnnnnnnnnnnnnnnnnnnnnnnnnnnnnnnnnnnnnnnnnnnnnnnnnnnnnnnnnnnnnnnnnnnnnnnnnnnnnnnnnnnnnnnnnnnnnnnnnnnnnnnnnnnnnnnnnnnnnnnnnnnnnnnnnnnnnnnnnnnnnnnnnnnnnnnnnnnnnnnnnnnnnnnnnnnnnnnnnnnnnnnnnnnnnnnnnnnnnnnnnnnnnnnnnnnnnnnnnnnnnnnnnnnnnnnnnnnnnnnnnnnnnnnnnnnnnnnnnnnnnnnnnnnnnnnnnnnnnnnnnnnnnnnnnnnnnnnnnnnnnnnnnnnnnnnnnnnnnnnnnnnnnnnnnnnnnnnnnnnnnnnnnnnnnnnnnnnnnnnnnnnnnnnnnnnnnnnnnnnnnnnnnnnnnnnnnnnnnnnnnnnnnnnnnnnnnnnnnnnnnnnnnnnnnnnnnnnnnnnnnnnnnnnnnnnnnnnnnnnnnnnnnnnnnnnnnnnnnnnnnnnnnnnnnnnnnnnnnnnnnnnnnnnnnnnnnnnnnnnnnnnnnnnnnnnnnnnnnnnnnnnnnnnnnnnnnnnnnnnnnnnnnnnnnnnnnnnnnnnnnnnnnnnnnnnnnnnnnnnnnnnnnnnnnnnnnnnnnnnnnnnnnnnnnnnnnnnnnnnnnnnnnnnnnnnnnnnnnnnnnnnnnnnnnnnnnnnnnnnnnnnnnnnnnnnnnnnnnnnnnnnnnnnnnnnnnnnnnnnnnnnnnnnnnnnnnnnnnnnnnnnnnnnnnnnnnnnnnnnnnnnnnnnnnnnnnnnnnnnnnnnnnnnnnnnnnnnnnnnnnnnnnnnnnnnnnnnnnnnnnnnnnnnnnnnnnnnnnnnnnnnnnnnnnnnnnnnnnnnnnnnnnnnnnnnnnnnnnnnnnnnnnnnnnnnnnnnnnnnnnnnnnnnnnnnnnnnnnnnnnnnnnnnnnnnnnnnnnnnnnnnnnnnnnnnnnnnnnnnnnnnnnnnnnnnnnnnnnnnnnnnnnnnnnnnnnnnnnnnnnnnnnnnnnnnnnnnnnnnnnnnnnnnnnnnnnnnnnnnnnnnnnnnnnnnnnnnnnnnnnnnnnnnnnnnnnnnnnnnnnnnnnnnnnnnnnnnnnnnnnnnnnnnnnnnnnnnnnnnnnnnnnnnnnnnnnnnnnnnnnnnnnnnnnnnnnnnnnnnnnnnnnnnnnnnnnnnnnnnnnnnnnnnnnnnnnnnnnnnnnnnnnnnnnnnnnnnnnnnnnnnnnnnnnnnnnnnnnnnnnnnnnnnnnnnnnnnnnnnnnnnnnnnnnnnnnnnnnnnnnnnnnnnnnnnnnnnnnnnnnnnnnnnnnnnnnnnnnnnnnnnnnnnnnnnnnnnnnnnnnnnnnnnnnnnnnnnnnnnnnnnnnnnnnnnnnnnnnnnnnnnnnnnnnnnnnnnnnnnnnnnnnnnnnnnnnnnnnnnnnnnnnnnnnnnnnnnnnnnnnnnnnnnnnnnnnnnnnnnnnnnnnnnnnnnnnnnnnnnnnnnnnnnnnnnnnnnnnnnnnnnnnnnnnnnnnnnnnnnnnnnnnnnnnnnnnnnnnnnnnnnnnnnnnnnnnnnnnnnnnnnnnnnnnnnnnnnnnnnnnnnnnnnnnnnnnnnnnnnnnnnnnnnnnnnnnnnnnnnnnnnnnnnnnnnnnnnnnnnnnnnnnnnnnnnnnnnnnnnnnnnnnnnnnnnnnnnnnnnnnnnnnnnnnnnnnnnnnnnnnnnnnnnnnnnnnnnnnnnnnnnnnnnnnnnnnnnnnnnnnnnnnnnnnnnnnnnnnnnnnnnnnnnnnnnnnnnnnnnnnnnnnnnnnnnnnnnnnnnnnnnnnnnnnnnnnnnnnnnnnnnnnnnnnnnnnnnnnnnnnnnnnnnnnnnnnnnnnnnnnnnnnnnnnnnnnnnnnnnnnnnnnnnnnnnnnnnnnnnnnnnnnnnnnnnnnnnnnnnnnnnnnnnnnnnnnnnnnnnnnnnnnnnnnnnnnnnnnnnnnnnnnnnnnnnnnnnnnnnnnnnnnnnnnnnnnnnnnnnnnnnnnnnnnnnnnnnnnnnnnnnnnnnnnnnnnnnnnnnnnnnnnnnnnnnnnnnnnnnnnnnnnnnnnnnnnnnnnnnnnnnnnnnnnnnnnnnnnnnnnnnnnnnnnnnnnnnnnnnnnnnnnnnnnnnnnnnnnnnnnnnnnnnnnnnnnnnnnnnnnnnnnnnnnnnnnnnnnnnnnnnnnnnnnnnnnnnnnnnnnnnnnnnnnnnnnnnnnnnnnnnnnnnnnnnnnnnnnnnnnnnnnnnnnnnnnnnnnnnnnnnnnnnnnnnnnnnnnnnnnnnnnnnnnnnnnnnnnnnnnnnnnnnnnnnnnnnnnnnnnnnnnnnnnnnnnnnnnnnnnnnnnnnnnnnnnnnnnnnnnnnnnnnnnnnnnnnnnnnnnnnnnnnnnnnnnnnnnnnnnnnnnnnnnnnnnnnnnnnnnnnnnnnnnnnnnnnnnnnnnnnnnnnnnnnnnnnnnnnnnnnnnnnnnnnnnnnnnnnnnnnnnnnnnnnnnnnnnnnnnnnnnnnnnnnnnnnnnnnnnnnnnnnnnnnnnnnnnnnnnnnnnnnnnnnnnnnnnnnnnnnnnnnnnnnnnnnnnnnnnnnnnnnnnnnnnnnnnnnnnnnnnnnnnnnnnnnnnnnnnnnnnnnnnnnnnnnnnnnnnnnnnnnnnnnnnnnnnnnnnnnnnnnnnnnnnnnnnnnnnnnnnnnnnnnnnnnnnnnnnnnnnnnnnnnnnnnnnnnnnnnnnnnnnnnnnnnnnnnnnnnnnnnnnnnnnnnnnnnnnnnnnnnnnnnnnnnnnnnnnnnnnnnnnnnnnnnnnnnnnnnnnnnnnnnnnnnnnnnnnnnnnnnnnnnnnnnnnnnnnnnnnnnnnnnnnnnnnnnnnnnnnnnnnnnnnnnnnnnnnnnnnnnnnnnnnnnnnnnnnnnnnnnnnnnnnnnnnnnnnnnnnnnnnnnnnnnnnnnnnnnnnnnnnnnnnnnnnnnnnnnnnnnnnnnnnnnnnnnnnnnnnnnnnnnnnnnnnnnnnnnnnnnnnnnnnnnnnnnnnnnnnnnnnnnnnnnnnnnnnnnnnnnnnnnnnnnnnnnnnnnnnnnnnnnnnnnnnnnnnnnnnnnnnnnnnnnnnnnnnnnnnnnnnnnnnnnnnnnnnnnnnnnnnnnnnnnnnnnnnnnnnnnnnnnnnnnnnnnnnnnnnnnnnnnnnnnnnnnnnnnnnnnnnnnnnnnnnnnnnnnnnnnnnnnnnnnnnnnnnnnnnnnnnnnnnnnnnnnnnnnnnnnnnnnnnnnnnnnnnnnnnnnnnnnnnnnnnnnnnnnnnnnnnnnnnnnnnnnnnnnnnnnnnnnnnnnnnnnnnnnnnnnnnnnnnnnnnnnnnnnnnnnnnnnnnnnnnnnnnnnnnnnnnnnnnnnnnnnnnnnnnnnnnnnnnnnnnnnnnnnnnnnnnnnnnnnnnnnnnnnnnnnnnnnnnnnnnnnnnnnnnnnnnnnnnnnnnnnnnnnnnnnnnnnnnnnnnnnnnnnnnnnnnnnnnnnnnnnnnnnnnnnnnnnnnnnnnnnnnnnnnnnnnnnnnnnnnnnnnnnnnnnnnnnnnnnnnnnnnnnnnnnnnnnnnnnnnnnnnnnnnnnnnnnnnnnnnnnnnnnnnnnnnnnnnnnnnnnnnnnnnnnnnnnnnnnnnnnnnnnnnnnnnnnnnnnnnnnnnnnnnnnnnnnnnnnnnnnnnnnnnnnnnnnnnnnnnnnnnnnnnnnnnnnnnnnnnnnnnnnnnnnnnnnnnnnnnnnnnnnnnnnnnnnnnnnnnnnnnnnnnnnnnnnnnnnnnnnnnnnnnnnnnnnnnnnnnnnnnnnnnnnnnnnnnnnnnnnnnnnnnnnnnnnnnnnnnnnnnnnnnnnnnnnnnnnnnnnnnnnnnnnnnnnnnnnnnnnnnnnnnnnnnnnnnnnnnnnnnnnnnnnnnnnnnnnnnnnnnnnnnnnnnnnnnnnnnnnnnnnnnnnnnnnnnnnnnnnnnnnnnnnnnnnnnnnnnnnnnnnnnnnnnnnnnnnnnnnnnnnnnnnnnnnnnnnnnnnnnnnnnnnnnnnnnnnnnnnnnnnnnnnnnnnnnnnnnnnnnnnnnnnnnnnnnnnnnnnnnnnnnnnnnnnnnnnnnnnnnnnnnnnnnnnnnnnnnnnnnnnnnnnnnnnnnnnnnnnnnnnnnnnnnnnnnnnnnnnnnnnnnnnnnnnnnnnnnnnnnnnnnnnnnnnnnnnnnnnnnnnnnnnnnnnnnnnnnnnnnnnnnnnnnnnnnnnnnnnnnnnnnnnnnnnnnnnnnnnnnnnnnnnnnnnnnnnnnnnnnnnnnnnnnnnnnnnnnnnnnnnnnnnnnnnnnnnnnnnnnnnnnnnnnnnnnnnnnnnnnnnnnnnnnnnnnnnnnnnnnnnnnnnnnnnnnnnnnnnnnnnnnnnnnnnnnnnnnnnnnnnnnnnnnnnnnnnnnnnnnnnnnnnnnnnnnnnnnnnnnnnnnnnnnnnnnnnnnnnnnnnnnnnnnnnnnnnnnnnnnnnnnnnnnnnnnnnnnnnnnnnnnnnnnnnnnnnnnnnnnnnnnnnnnnnnnnnnnnnnnnnnnnnnnnnnnnnnnnnnnnnnnnnnnnnnnnnnnnnnnnnnnnnnnnnnnnnnnnnnnnnnnnnnnnnnnnnnnnnnnnnnnnnnnnnnnnnnnnnnnnnnnnnnnnnnnnnnnnnnnnnnnnnnnnnnnnnnnnnnnnnnnnnnnnnnnnnnnnnnnnnnnnnnnnnnnnnnnnnnnnnnnnnnnnnnnnnnnnnnnnnnnnnnnnnnnnnnnnnnnnnnnnnnnnnnnnnnnnnnnnnnnnnnnnnnnnnnnnnnnnnnnnnnnnnnnnnnnnnnnnnnnnnnnnnnnnnnnnnnnnnnnnnnnnnnnnnnnnnnnnnnnnnnnnnnnnnnnnnnnnnnnnnnnnnnnnnnnnnnnnnnnnnnnnnnnnnnnnnnnnnnnnnnnnnnnnnnnnnnnnnnnnnnnnnnnnnnnnnnnnnnnnnnnnnnnnnnnnnnnnnnnnnnnnnnnnnnnnnnnnnnnnnnnnnnnnnnnnnnnnnnnnnnnnnnnnnnnnnnnnnnnnnnnnnnnnnnnnnnnnnnnnnnnnnnnnnnnnnnnnnnnnnnnnnnnnnnnnnnnnnnnnnnnnnnnnnnnnnnnnnnnnnnnnnnnnnnnnnnnnnnnnnnnnnnnnnnnnnnnnnnnnnnnnnnnnnnnnnnnnnnnnnnnnnnnnnnnnnnnnnnnnnnnnnnnnnnnnnnnnnnnnnnnnnnnnnnnnnnnnnnnnnnnnnnnnnnnnnnnnnnnnnnnnnnnnnnnnnnnnnnnnnnnnnnnnnnnnnnnnnnnnnnnnnnnnnnnnnnnnnnnnnnnnnnnnnnnnnnnnnnnnnnnnnnnnnnnnnnnnnnnnnnnnnnnnnnnnnnnnnnnnnnnnnnnnnnnnnnnnnnnnnnnnnnnnnnnnnnnnnnnnnnnnnnnnnnnnnnnnnnnnnnnnnnnnnnnnnnnnnnnnnnnnnnnnnnnnnnnnnnnnnnnnnnnnnnnnnnnnnnnnnnnnnnnnnnnnnnnnnnnnnnnnnnnnnnnnnnnnnnnnnnnnnnnnnnnnnnnnnnnnnnnnnnnnnnnnnnnnnnnnnnnnnnnnnnnnnnnnnnnnnnnnnnnnnnnnnnnnnnnnnnnnnnnnnnnnnnnnnnnnnnnnnnnnnnnnnnnnnnnnnnnnnnnnnnnnnnnnnnnnnnnnnnnnnnnnnnnnnnnnnnnnnnnnnnnnnnnnnnnnnnnnnnnnnnnnnnnnnnnnnnnnnnnnnnnnnnnnnnnnnnnnnnnnnnnnnnnnnnnnnnnnnnnnnnnnnnnnnnnnnnnnnnnnnnnnnnnnnnnnnnnnnnnnnnnnnnnnnnnnnnnnnnnnnnnnnnnnnnnnnnnnnnnnnnnnnnnnnnnnnnnnnnnnnnnnnnnnnnnnnnnnnnnnnnnnnnnnnnnnnnnnnnnnnnnnnnnnnnnnnnnnnnnnnnnnnnnnnnnnnnnnnnnnnnnnnnnnnnnnnnnnnnnnnnnnnnnnnnnnnnnnnnnnnnnnnnnnnnnnnnnnnnnnnnnnnnnnnnnnnnnnnnnnnnnnnnnnnnnnnnnnnnnnnnnnnnnnnnnnnnnnnnnnnnnnnnnnnnnnnnnnnnnnnnnnnnnnnnnnnnnnnnnnnnnnnnnnnnnnnnnnnnnnnnnnnnnnnnnnnnnnnnnnnnnnnnnnnnnnnnnnnnnnnnnnnnnnnnnnnnnnnnnnnnnnnnnnnnnnnnnnnnnnnnnnnnnnnnnnnnnnnnnnnnnnnnnnnnnnnnnnnnnnnnnnnnnnnnnnnnnnnnnnnnnnnnnnnnnnnnnnnnnnnnnnnnnnnnnnnnnnnnnnnnnnnnnnnnnnnnnnnnnnnnnnnnnnnnnnnnnnnnnnnnnnnnnnnnnnnnnnnnnnnnnnnnnnnnnnnnnnnnnnnnnnnnnnnnnnnnnnnnnnnnnnnnnnnnnnnnnnnnnnnnnnnnnnnnnnnnnnnnnnnnnnnnnnnnnnnnnnnnnnnnnnnnnnnnnnnnnnnnnnnnnnnnnnnnnnnnnnnnnnnnnnnnnnnnnnnnnnnnnnnnnnnnnnnnnnnnnnnnnnnnnnnnnnnnnnnnnnnnnnnnnnnnnnnnnnnnnnnnnnnnnnnnnnnnnnnnnnnnnnnnnnnnnnnnnnnnnnnnnnnnnnnnnnnnnnnnnnnnnnnnnnnnnnnnnnnnnnnnnnnnnnnnnnnnnnnnnnnnnnnnnnnnnnnnnnnnnnnnnnnnnnnnnnnnnnnnnnnnnnnnnnnnnnnnnnnnnnnnnnnnnnnnnnnnnnnnnnnnnnnnnnnnnnnnnnnnnnnnnnnnnnnnnnnnnnnnnnnnnnnnnnnnnnnnnnnnnnnnnnnnnnnnnnnnnnnnnnnnnnnnnnnnnnnnnnnnnnnnnnnnnnnnnnnnnnnnnnnnnnnnnnnnnnnnnnnnnnnnnnnnnnnnnnnnnnnnnnnnnnnnnnnnnnnnnnnnnnnnnnnnnnnnnnnnnnnnnnnnnnnnnnnnnnnnnnnnnnnnnnnnnnnnnnnnnnnnnnnnnnnnnnnnnnnnnnnnnnnnnnnnnnnnnnnnnnnnnnnnnnnnnnnnnnnnnnnnnnnnnnnnnnnnnnnnnnnnnnnnnnnnnnnnnnnnnnnnnnnnnnnnnnnnnnnnnnnnnnnnnnnnnnnnnnnnnnnnnnnnnnnnnnnnnnnnnnnnnnnnnnnnnnnnnnnnnnnnnnnnnnnnnnnnnnnnnnnnnnnnnnnnnnnnnnnnnnnnnnnnnnnnnnnnnnnnnnnnnnnnnnnnnnnnnnnnnnnnnnnnnnnnnnnnnnnnnnnnnnnnnnnnnnnnnnnnnnnnnnnnnnnnnnnnnnnnnnnnnnnnnnnnnnnnnnnnnnnnnnnnnnnnnnnnnnnnnnnnnnnnnnnnnnnnnnnnnnnnnnnnnnnnnnnnnnnnnnnnnnnnnnnnnnnnnnnnnnnnnnnnnnnnnnnnnnnnnnnnnnnnnnnnnnnnnnnnnnnnnnnnnnnnnnnnnnnnnnnnnnnnnnnnnnnnnnnnnnnnnnnnnnnnnnnnnnnnnnnnnnnnnnnnnnnnnnnnnnnnnnnnnnnnnnnnnnnnnnnnnnnnnnnnnnnnnnnnnnnnnnnnnnnnnnnnnnnnnnnnnnnnnnnnnnnnnnnnnnnnnnnnnnnnnnnnnnnnnnnnnnnnnnnnnnnnnnnnnnnnnnnnnnnnnnnnnnnnnnnnnnnnnnnnnnnnnnnnnnnnnnnnnnnnnnnnnnnnnnnnnnnnnnnnnnnnnnnnnnnnnnnnnnnnnnnnnnnnnnnnnnnnnnnnnnnnnnnnnnnnnnnnnnnnnnnnnnnnnnnnnnnnnnnnnnnnnnnnnnnnnnnnnnnnnnnnnnnnnnnnnnnnnnnnnnnnnnnnnnnnnnnnnnnnnnnnnnnnnnnnnnnnnnnnnnnnnnnnnnnnnnnnnnnnnnnnnnnnnnnnnnnnnnnnnnnnnnnnnnnnnnnnnnnnnnnnnnnnnnnnnnnnnnnnnnnnnnnnnnnnnnnnnnnnnnnnnnnnnnnnnnnnnnnnnnnnnnnnnnnnnnnnnnnnnnnnnnnnnnnnnnnnnnnnnnnnnnnnnnnnnnnnnnnnnnnnnnnnnnnnnnnnnnnnnnnnnnnnnnnnnnnnnnnnnnnnnnnnnnnnnnnnnnnnnnnnnnnnnnnnnnnnnnnnnnnnnnnnnnnnnnnnnnnnnnnnnnnnnnnnnnnnnnnnnnnnnnnnnnnnnnnnnnnnnnnnnnnnnnnnnnnnnnnnnnnnnnnnnnnnnnnnnnnnnnnnnnnnnnnnnnnnnnnnnnnnnnnnnnnnnnnnnnnnnnnnnnnnnnnnnnnnnnnnnnnnnnnnnnnnnnnnnnnnnnnnnnnnnnnnnnnnnnnnnnnnnnnnnnnnnnnnnnnnnnnnnnnnnnnnnnnnnnnnnnnnnnnnnnnnnnnnnnnnnnnnnnnnnnnnnnnnnnnnnnnnnnnnnnnnnnnnnnnnnnnnnnnnnnnnnnnnnnnnnnnnnnnnnnnnnnnnnnnnnnnnnnnnnnnnnnnnnnnnnnnnnnnnnnnnnnnnnnnnnnnnnnnnnnnnnnnnnnnnnnnnnnnnnnnnnnnnnnnnnnnnnnnnnnnnnnnnnnnnnnnnnnnnnnnnnnnnnnnnnnnnnnnnnnnnnnnnnnnnnnnnnnnnnnnnnnnnnnnnnnnnnnnnnnnnnnnnnnnnnnnnnnnnnnnnnnnnnnnnnnnnnnnnnnnnnnnnnnnnnnnnnnnnnnnnnnnnnnnnnnnnnnnnnnnnnnnnnnnnnnnnnnnnnnnnnnnnnnnnnnnnnnnnnnnnnnnnnnnnnnnnnnnnnnnnnnnnnnnnnnnnnnnnnnnnnnnnnnnnnnnnnnnnnnnnnnnnnnnnnnnnnnnnnnnnnnnnnnnnnnnnnnnnnnnnnnnnnnnnnnnnnnnnnnnnnnnnnnnnnnnnnnnnnnnnnnnnnnnnnnnnnnnnnnnnnnnnnnnnnnnnnnnnnnnnnnnnnnnnnnnnnnnnnnnnnnnnnnnnnnnnnnnnnnnnnnnnnnnnnnnnnnnnnnnnnnnnnnnnnnnnnnnnnnnnnnnnnnnnnnnnnnnnnnnnnnnnnnnnnnnnnnnnnnnnnnnnnnnnnnnnnnnnnnnnnnnnnnnnnnnnnnnnnnnnnnnnnnnnnnnnnnnnnnnnnnnnnnnnnnnnnnnnnnnnnnnnnnnnnnnnnnnnnnnnnnnnnnnnnnnnnnnnnnnnnnnnnnnnnnnnnnnnnnnnnnnnnnnnnnnnnnnnnnnnnnnnnnnnnnnnnnnnnnnnnnnnnnnnnnnnnnnnnnnnnnnnnnnnnnnnnnnnnnnnnnnnnnnnnnnnnnnnnnnnnnnnnnnnnnnnnnnnnnnnnnnnnnnnnnnnnnnnnnnnnnnnnnnnnnnnnnnnnnnnnnnnnnnnnnnnnnnnnnnnnnnnnnnnnnnnnnnnnnnnnnnnnnnnnnnnnnnnnnnnnnnnnnnnnnnnnnnnnnnnnnnnnnnnnnnnnnnnnnnnnnnnnnnnnnnnnnnnnnnnnnnnnnnnnnnnnnnnnnnnnnnnnnnnnnnnnnnnnnnnnnnnnnnnnnnnnnnnnnnnnnnnnnnnnnnnnnnnnnnnnnnnnnnnnnnnnnnnnnnnnnnnnnnnnnnnnnnnnnnnnnnnnnnnnnnnnnnnnnnnnnnnnnnnnnnnnnnnnnnnnnnnnnnnnnnnnnnnnnnnnnnnnnnnnnnnnnnnnnnnnnnnnnnnnnnnnnnnnnnnnnnnnnnnnnnnnnnnnnnnnnnnnnnnnnnnnnnnnnnnnnnnnnnnnnnnnnnnnnnnnnnnnnnnnnnnnnnnnnnnnnnnnnnnnnnnnnnnnnnnnnnnnnnnnnnnnnnnnnnnnnnnnnnnnnnnnnnnnnnnnnnnnnnnnnnnnnnnnnnnnnnnnnnnnnnnnnnnnnnnnnnnnnnnnnnnnnnnnnnnnnnnnnnnnnnnnnnnnnnnnnnnnnnnnnnnnnnnnnnnnnnnnnnnnnnnnnnnnnnnnnnnnnnnnnnnnnnnnnnnnnnnnnnnnnnnnnnnnnnnnnnnnnnnnnnnnnnnnnnnnnnnnnnnnnnnnnnnnnnnnnnnnnnnnnnnnnnnnnnnnnnnnnnnnnnnnnnnnnnnnnnnnnnnnnnnnnnnnnnnnnnnnnnnnnnnnnnnnnnnnnnnnnnnnnnnnnnnnnnnnnnnnnnnnnnnnnnnnnnnnnnnnnnnnnnnnnnnnnnnnnnnnnnnnnnnnnnnnnnnnnnnnnnnnnnnnnnnnnnnnnnnnnnnnnnnnnnnnnnnnnnnnnnnnnnnnnnnnnnnnnnnnnnnnnnnnnnnnnnnnnnnnnnnnnnnnnnnnnnnnnnnnnnnnnnnnnnnnnnnnnnnnnnnnnnnnnnnnnnnnnnnnnnnnnnnnnnnnnnnnnnnnnnnnnnnnnnnnnnnnnnnnnnnnnnnnnnnnnnnnnnnnnnnnnnnnnnnnnnnnnnnnnnnnnnnnnnnnnnnnnnnnnnnnnnnnnnnnnnnnnnnnnnnnnnnnnnnnnnnnnnnnnnnnnnnnnnnnnnnnnnnnnnnnnnnnnnnnnnnnnnnnnnnnnnnnnnnnnnnnnnnnnnnnnnnnnnnnnnnnnnnnnnnnnnnnnnnnnnnnnnnnnnnnnnnnnnnnnnnnnnnnnnnnnnnnnnnnnnnnnnnnnnnnnnnnnnnnnnnnnnnnnnnnnnnnnnnnnnnnnnnnnnnnnnnnnnnnnnnnnnnnnnnnnnnnnnnnnnnnnnnnnnnnnnnnnnnnnnnnnnnnnnnnnnnnnnnnnnnnnnnnnnnnnnnnnnnnnnnnnnnnnnnnnnnnnnnnnnnnnnnnnnnnnnnnnnnnnnnnnnnnnnnnnnnnnnnnnnnnnnnnnnnnnnnnnnnnnnnnnnnnnnnnnnnnnnnnnnnnnnnnnnnnnnnnnnnnnnnnnnnnnnnnnnnnnnnnnnnnnnnnnnnnnnnnnnnnnnnnnnnnnnnnnnnnnnnnnnnnnnnnnnnnnnnnnnnnnnnnnnnnnnnnnnnnnnnnnnnnnnnnnnnnnnnnnnnnnnnnnnnnnnnnnnnnnnnnnnnnnnnnnnnnnnnnnnnnnnnnnnnnnnnnnnnnnnnnnnnnnnnnnnnnnnnnnnnnnnnnnnnnnnnnnnnnnnnnnnnnnnnnnnnnnnnnnnnnnnnnnnnnnnnnnnnnnnnnnnnnnnnnnnnnnnnnnnnnnnnnnnnnnnnnnnnnnnnnnnnnnnnnnnnnnnnnnnnnnnnnnnnnnnnnnnnnnnnnnnnnnnnnnnnnnnnnnnnnnnnnnnnnnnnnnnnnnnnnnnnnnnnnnnnnnnnnnnnnnnnnnnnnnnnnnnnnnnnnnnnnnnnnnnnnnnnnnnnnnnnnnnnnnnnnnnnnnnnnnnnnnnnnnnnnnnnnnnnnnnnnnnnnnnnnnnnnnnnnnnnnnnnnnnnnnnnnnnnnnnnnnnnnnnnnnnnnnnnnnnnnnnnnnnnnnnnnnnnnnnnnnnnnnnnnnnnnnnnnnnnnnnnnnnnnnnnnnnnnnnnnnnnnnnnnnnnnnnnnnnnnnnnnnnnnnnnnnnnnnnnnnnnnnnnnnnnnnnnnnnnnnnnnnnnnnnnnnnnnnnnnnnnnnnnnnnnnnnnnnnnnnnnnnnnnnnnnnnnnnnnnnnnnnnnnnnnnnnnnnnnnnnnnnnnnnnnnnnnnnnnnnnnnnnnnnnnnnnnnnnnnnnnnnnnnnnnnnnnnnnnnnnnnnnnnnnnnnnnnnnnnnnnnnnnnnnnnnnnnnnnnnnnnnnnnnnnnnnnnnnnnnnnnnnnnnnnnnnnnnnnnnnnnnnnnnnnnnnnnnnnnnnnnnnnnnnnnnnnnnnnnnnnnnnnnnnnnnnnnnnnnnnnnnnnnnnnnnnnnnnnnnnnnnnnnnnnnnnnnnnnnnnnnnnnnnnnnnnnnnnnnnnnnnnnnnnnnnnnnnnnnnnnnnnnnnnnnnnnnnnnnnnnnnnnnnnnnnnnnnnnnnnnnnnnnnnnnnnnnnnnnnnnnnnnnnnnnnnnnnnnnnnnnnnnnnnnnnnnnnnnnnnnnnnnnnnnnnnnnnnnnnnnnnnnnnnnnnnnnnnnnnnnnnnnnnnnnnnnnnnnnnnnnnnnnnnnnnnnnnnnnnnnnnnnnnnnnnnnnnnnnnnnnnnnnnnnnnnnnnnnnnnnnnnnnnnnnnnnnnnnnnnnnnnnnnnnnnnnnnnnnnnnnnnnnnnnnnnnnnnnnnnnnnnnnnnnnnnnnnnnnnnnnnnnnnnnnnnnnnnnnnnnnnnnnnnnnnnnnnnnnnnnnnnnnnnnnnnnnnnnnnnnnnnnnnnnnnnnnnnnnnnnnnnnnnnnnnnnnnnnnnnnnnnnnnnnnnnnnnnnnnnnnnnnnnnnnnnnnnnnnnnnnnnnnnnnnnnnnnnnnnnnnnnnnnnnnnnnnnnnnnnnnnnnnnnnnnnnnnnnnnnnnnnnnnnnnnnnnnnnnnnnnnnnnnnnnnnnnnnnnnnnnnnnnnnnnnnnnnnnnnnnnnnnnnnnnnnnnnnnnnnnnnnnnnnnnnnnnnnnnnnnnnnnnnnnnnnnnnnnnnnnnnnnnnnnnnnnnnnnnnnnnnnnnnnnnnnnnnnnnnnnnnnnnnnnnnnnnnnnnnnnnnnnnnnnnnnnnnnnnnnnnnnnnnnnnnnnnnnnnnnnnnnnnnnnnnnnnnnnnnnnnnnnnnnnnnnnnnnnnnnnnnnnnnnnnnnnnnnnnnnnnnnnnnnnnnnnnnnnnnnnnnnnnnnnnnnnnnnnnnnnnnnnnnnnnnnnnnnnnnnnnnnnnnnnnnnnnnnnnnnnnnnnnnnnnnnnnnnnnnnnnnnnnnnnnnnnnnnnnnnnnnnnnnnnnnnnnnnnnnnnnnnnnnnnnnnnnnnnnnnnnnnnnnnnnnnnnnnnnnnnnnnnnnnnnnnnnnnnnnnnnnnnnnnnnnnnnnnnnnnnnnnnnnnnnnnnnnnnnnnnnnnnnnnnnnnnnnnnnnnnnnnnnnnnnnnnnnnnnnnnnnnnnnnnnnnnnnnnnnnnnnnnnnnnnnnnnnnnnnnnnnnnnnnnnnnnnnnnnnnnnnnnnnnnnnnnnnnnnnnnnnnnnnnnnnnnnnnnnnnnnnnnnnnnnnnnnnnnnnnnnnnnnnnnnnnnnnnnnnnnnnnnnnnnnnnnnnnnnnnnnnnnnnnnnnnnnnnnnnnnnnnnnnnnnnnnnnnnnnnnnnnnnnnnnnnnnnnnnnnnnnnnnnnnnnnnnnnnnnnnnnnnnnnnnnnnnnnnnnnnnnnnnnnnnnnnnnnnnnnnnnnnnnnnnnnnnnnnnnnnnnnnnnnnnnnnnnnnnnnnnnnnnnnnnnnnnnnnnnnnnnnnnnnnnnnnnnnnnnnnnnnnnnnnnnnnnnnnnnnnnnnnnnnnnnnnnnnnnnnnnnnnnnnnnnnnnnnnnnnnnnnnnnnnnnnnnnnnnnnnnnnnnnnnnnnnnnnnnnnnnnnnnnnnnnnnnnnnnnnnnnnnnnnnnnnnnnnnnnnnnnnnnnnnnnnnnnnnnnnnnnnnnnnnnnnnnnnnnnnnnnnnnnnnnnnnnnnnnnnnnnnnnnnnnnnnnnnnnnnnnnnnnnnnnnnnnnnnnnnnnnnnnnnnnnnnnnnnnnnnnnnnnnnnnnnnnnnnnnnnnnnnnnnnnnnnnnnnnnnnnnnnnnnnnnnnnnnnnnnnnnnnnnnnnnnnnnnnnnnnnnnnnnnnnnnnnnnnnnnnnnnnnnnnnnnnnnnnnnnnnnnnnnnnnnnnnnnnnnnnnnnnnnnnnnnnnnnnnnnnnnnnnnnnnnnnnnnnnnnnnnnnnnnnnnnnnnnnnnnnnnnnnnnnnnnnnnnnnnnnnnnnnnnnnnnnnnnnnnnnnnnnnnnnnnnnnnnnnnnnnnnnnnnnnnnnnnnnnnnnnnnnnnnnnnnnnnnnnnnnnnnnnnnnnnnnnnnnnnnnnnnnnnnnnnnnnnnnnnnnnnnnnnnnnnnnnnnnnnnnnnnnnnnnnnnnnnnnnnnnnnnnnnnnnnnnnnnnnnnnnnnnnnnnnnnnnnnnnnnnnnnnnnnnnnnnnnnnnnnnnnnnnnnnnnnnnnnnnnnnnnnnnnnnnnnnnnnnnnnnnnnnnnnnnnnnnnnnnnnnnnnnnnnnnnnnnnnnnnnnnnnnnnnnnnnnnnnnnnnnnnnnnnnnnnnnnnnnnnnnnnnnnnnnnnnnnnnnnnnnnnnnnnnnnnnnnnnnnnnnnnnnnnnnnnnnnnnnnnnnnnnnnnnnnnnnnnnnnnnnnnnnnnnnnnnnnnnnnnnnnnnnnnnnnnnnnnnnnnnnnnnnnnnnnnnnnnnnnnnnnnnnnnnnnnnnnnnnnnnnnnnnnnnnnnnnnnnnnnnnnnnnnnnnnnnnnnnnnnnnnnnnnnnnnnnnnnnnnnnnnnnnnnnnnnnnnnnnnnnnnnnnnnnnnnnnnnnnnnnnnnnnnnnnnnnnnnnnnnnnnnnnnnnnnnnnnnnnnnnnnnnnnnnnnnnnnnnnnnnnnnnnnnnnnnnnnnnnnnnnnnnnnnnnnnnnnnnnnnnnnnnnnnnnnnnnnnnnnnnnnnnnnnnnnnnnnnnnnnnnnnnnnnnnnnnnnnnnnnnnnnnnnnnnnnnnnnnnnnnnnnnnnnnnnnnnnnnnnnnnnnnnnnnnnnnnnnnnnnnnnnnnnnnnnnnnnnnnnnnnnnnnnnnnnnnnnnnnnnnnnnnnnnnnnnnnnnnnnnnnnnnnnnnnnnnnnnnnnnnnnnnnnnnnnnnnnnnnnnnnnnnnnnnnnnnnnnnnnnnnnnnnnnnnnnnnnnnnnnnnnnnnnnnnnnnnnnnnnnnnnnnnnnnnnnnnnnnnnnnnnnnnnnnnnnnnnnnnnnnnnnnnnnnnnnnnnnnnnnnnnnnnnnnnnnnnnnnnnnnnnnnnnnnnnnnnnnnnnnnnnnnnnnnnnnnnnnnnnnnnnnnnnnnnnnnnnnnnnnnnnnnnnnnnnnnnnnnnnnnnnnnnnnnnnnnnnnnnnnnnnnnnnnnnnnnnnnnnnnnnnnnnnnnnnnnnnnnnnnnnnnnnnnnnnnnnnnnnnnnnnnnnnnnnnnnnnnnnnnnnnnnnnnnnnnnnnnnnnnnnnnnnnnnnnnnnnnnnnnnnnnnnnnnnnnnnnnnnnnnnnnnnnnnnnnnnnnnnnnnnnnnnnnnnnnnnnnnnnnnnnnnnnnnnnnnnnnnnnnnnnnnnnnnnnnnnnnnnnnnnnnnnnnnnnnnnnnnnnnnnnnnnnnnnnnnnnnnnnnnnnnnnnnnnnnnnnnnnnnnnnnnnnnnnnnnnnnnnnnnnnnnnnnnnnnnnnnnnnnnnnnnnnnnnnnnnnnnnnnnnnnnnnnnnnnnnnnnnnnnnnnnnnnnnnnnnnnnnnnnnnnnnnnnnnnnnnnnnnnnnnnnnnnnnnnnnnnnnnnnnnnnnnnnnnnnnnnnnnnnnnnnnnnnnnnnnnnnnnnnnnnnnnnnnnnnnnnnnnnnnnnnnnnnnnnnnnnnnnnnnnnnnnnnnnnnnnnnnnnnnnnnnnnnnnnnnnnnnnnnnnnnnnnnnnnnnnnnnnnnnnnnnnnnnnnnnnnnnnnnnnnnnnnnnnnnnnnnnnnnnnnnnnnnnnnnnnnnnnnnnnnnnnnnnnnnnnnnnnnnnnnnnnnnnnnnnnnnnnnnnnnnnnnnnnnnnnnnnnnnnnnnnnnnnnnnnnnnnnnnnnnnnnnnnnnnnnnnnnnnnnnnnnnnnnnnnnnnnnnnnnnnnnnnnnnnnnnnnnnnnnnnnnnnnnnnnnnnnnnnnnnnnnnnnnnnnnnnnnnnnnnnnnnnnnnnnnnnnnnnnnnnnnnnnnnnnnnnnnnnnnnnnnnnnnnnnnnnnnnnnnnnnnnnnnnnnnnnnnnnnnnnnnnnnnnnnnnnnnnnnnnnnnnnnnnnnnnnnnnnnnnnnnnnnnnnnnnnnnnnnnnnnnnnnnnnnnnnnnnnnnnnnnnnnnnnnnnnnnnnnnnnnnnnnnnnnnnnnnnnnnnnnnnnnnnnnnnnnnnnnnnnnnnnnnnnnnnnnnnnnnnnnnnnnnnnnnnnnnnnnnnnnnnnnnnnnnnnnnnnnnnnnnnnnnnnnnnnnnnnnnnnnnnnnnnnnnnnnnnnnnnnnnnnnnnnnnnnnnnnnnnnnnnnnnnnnnnnnnnnnnnnnnnnnnnnnnnnnnnnnnnnnnnnnnnnnnnnnnnnnnnnnnnnnnnnnnnnnnnnnnnnnnnnnnnnnnnnnnnnnnnnnnnnnnnnnnnnnnnnnnnnnnnnnnnnnnnnnnnnnnnnnnnnnnnnnnnnnnnnnnnnnnnnnnnnnnnnnnnnnnnnnnnnnnnnnnnnnnnnnnnnnnnnnnnnnnnnnnnnnnnnnnnnnnnnnnnnnnnnnnnnnnnnnnnnnnnnnnnnnnnnnnnnnnnnnnnnnnnnnnnnnnnnnnnnnnnnnnnnnnnnnnnnnnnnnnnnnnnnnnnnnnnnnnnnnnnnnnnnnnnnnnnnnnnnnnnnnnnnnnnnnnnnnnnnnnnnnnnnnnnnnnnnnnnnnnnnnnnnnnnnnnnnnnnnnnnnnnnnnnnnnnnnnnnnnnnnnnnnnnnnnnnnnnnnnnnnnnnnnnnnnnnnnnnnnnnnnnnnnnnnnnnnnnnnnnnnnnnnnnnnnnnnnnnnnnnnnnnnnnnnnnnnnnnnnnnnnnnnnnnnnnnnnnnnnnnnnnnnnnnnnnnnnnnnnnnnnnnnnnnnnnnnnnnnnnnnnnnnnnnnnnnnnnnnnnnnnnnnnnnnnnnnnnnnnnnnnnnnnnnnnnnnnnnnnnnnnnnnnnnnnnnnnnnnnnnnnnnnnnnnnnnnnnnnnnnnnnnnnnnnnnnnnnnnnnnnnnnnnnnnnnnnnnnnnnnnnnnnnnnnnnnnnnnnnnnnnnnnnnnnnnnnnnnnnnnnnnnnnnnnnnnnnnnnnnnnnnnnnnnnnnnnnnnnnnnnnnnnnnnnnnnnnnnnnnnnnnnnnnnnnnnnnnnnnnnnnnnnnnnnnnnnnnnnnnnnnnnnnnnnnnnnnnnnnnnnnnnnnnnnnnnnnnnnnnnnnnnnnnnnnnnnnnnnnnnnnnnnnnnnnnnnnnnnnnnnnnnnnnnnnnnnnnnnnnnnnnnnnnnnnnnnnnnnnnnnnnnnnnnnnnnnnnnnnnnnnnnnnnnnnnnnnnnnnnnnnnnnnnnnnnnnnnnnnnnnnnnnnnnnnnnnnnnnnnnnnnnnnnnnnnnnnnnnnnnnnnnnnnnnnnnnnnnnnnnnnnnnnnnnnnnnnnnnnnnnnnnnnnnnnnnnnnnnnnnnnnnnnnnnnnnnnnnnnnnnnnnnnnnnnnnnnnnnnnnnnnnnnnnnnnnnnnnnnnnnnnnnnnnnnnnnnnnnnnnnnnnnnnnnnnnnnnnnnnnnnnnnnnnnnnnnnnnnnnnnnnnnnnnnnnnnnnnnnnnnnnnnnnnnnnnnnnnnnnnnnnnnnnnnnnnnnnnnnnnnnnnnnnnnnnnnnnnnnnnnnnnnnnnnnnnnnnnnnnnnnnnnnnnnnnnnnnnnnnnnnnnnnnnnnnnnnnnnnnnnnnnnnnnnnnnnnnnnnnnnnnnnnnnnnnnnnnnnnnnnnnnnnnnnnnnnnnnnnnnnnnnnnnnnnnnnnnnnnnnnnnnnnnnnnnnnnnnnnnnnnnnnnnnnnnnnnnnnnnnnnnnnnnnnnnnnnnnnnnnnnnnnnnnnnnnnnnnnnnnnnnnnnnnnnnnnnnnnnnnnnnnnnnnnnnnnnnnnnnnnnnnnnnnnnnnnnnnnnnnnnnnnnnnnnnnnnnnnnnnnnnnnnnnnnnnnnnnnnnnnnnnnnnnnnnnnnnnnnnnnnnnnnnnnnnnnnnnnnnnnnnnnnnnnnnnnnnnnnnnnnnnnnnnnnnnnnnnnnnnnnnnnnnnnnnnnnnnnnnnnnnnnnnnnnnnnnnnnnnnnnnnnnnnnnnnnnnnnnnnnnnnnnnnnnnnnnnnnnnnnnnnnnnnnnnnnnnnnnnnnnnnnnnnnnnnnnnnnnnnnnnnnnnnnnnnnnnnnnnnnnnnnnnnnnnnnnnnnnnnnnnnnnnnnnnnnnnnnnnnnnnnnnnnnnnnnnnnnnnnnnnnnnnnnnnnnnnnnnnnnnnnnnnnnnnnnnnnnnnnnnnnnnnnnnnnnnnnnnnnnnnnnnnnnnnnnnnnnnnnnnnnnnnnnnnnnnnnnnnnnnnnnnnnnnnnnnnnnnnnnnnnnnnnnnnnnnnnnnnnnnnnnnnnnnnnnnnnnnnnnnnnnnnnnnnnnnnnnnnnnnnnnnnnnnnnnnnnnnnnnnnnnnnnnnnnnnnnnnnnnnnnnnnnnnnnnnnnnnnnnnnnnnnnnnnnnnnnnnnnnnnnnnnnnnnnnnnnnnnnnnnnnnnnnnnnnnnnnnnnnnnnnnnnnnnnnnnnnnnnnnnnnnnnnnnnnnnnnnnnnnnnnnnnnnnnnnnnnnnnnnnnnnnnnnnnnnnnnnnnnnnnnnnnnnnnnnnnnnnnnnnnnnnnnnnnnnnnnnnnnnnnnnnnnnnnnnnnnnnnnnnnnnnnnnnnnnnnnnnnnnnnnnnnnnnnnnnnnnnnnnnnnnnnnnnnnnnnnnnnnnnnnnnnnnnnnnnnnnnnnnnnnnnnnnnnnnnnnnnnnnnnnnnnnnnnnnnnnnnnnnnnnnnnnnnnnnnnnnnnnnnnnnnnnnnnnnnnnnnnnnnnnnnnnnnnnnnnnnnnnnnnnnnnnnnnnnnnnnnnnnnnnnnnnnnnnnnnnnnnnnnnnnnnnnnnnnnnnnnnnnnnnnnnnnnnnnnnnnnnnnnnnnnnnnnnnnnnnnnnnnnnnnnnnnnnnnnnnnnnnnnnnnnnnnnnnnnnnnnnnnnnnnnnnnnnnnnnnnnnnnnnnnnnnnnnnnnnnnnnnnnnnnnnnnnnnnnnnnnnnnnnnnnnnnnnnnnnnnnnnnnnnnnnnnnnnnnnnnnnnnnnnnnnnnnnnnnnnnnnnnnnnnnnnnnnnnnnnnnnnnnnnnnnnnnnnnnnnnnnnnnnnnnnnnnnnnnnnnnnnnnnnnnnnnnnnnnnnnnnnnnnnnnnnnnnnnnnnnnnnnnnnnnnnnnnnnnnnnnnnnnnnnnnnnnnnnnnnnnnnnnnnnnnnnnnnnnnnnnnnnnnnnnnnnnnnnnnnnnnnnnnnnnnnnnnnnnnnnnnnnnnnnnnnnnnnnnnnnnnnnnnnnnnnnnnnnnnnnnnnnnnnnnnnnnnnnnnnnnnnnnnnnnnnnnnnnnnnnnnnnnnnnnnnnnnnnnnnnnnnnnnnnnnnnnnnnnnnnnnnnnnnnnnnnnnnnnnnnnnnnnnnnnnnnnnnnnnnnnnnnnnnnnnnnnnnnnnnnnnnnnnnnnnnnnnnnnnnnnnnnnnnnnnnnnnnnnnnnnnnnnnnnnnnnnnnnnnnnnnnnnnnnnnnnnnnnnnnnnnnnnnnnnnnnnnnnnnnnnnnnnnnnnnnnnnnnnnnnnnnnnnnnnnnnnnnnnnnnnnnnnnnnnnnnnnnnnnnnnnnnnnnnnnnnnnnnnnnnnnnnnnnnnnnnnnnnnnnnnnnnnnnnnnnnnnnnnnnnnnnnnnnnnnnnnnnnnnnnnnnnnnnnnnnnnnnnnnnnnnnnnnnnnnnnnnnnnnnnnnnnnnnnnnnnnnnnnnnnnnnnnnnnnnnnnnnnnnnnnnnnnnnnnnnnnnnnnnnnnnnnnnnnnnnnnnnnnnnnnnnnnnnnnnnnnnnnnnnnnnnnnnnnnnnnnnnnnnnnnnnnnnnnnnnnnnnnnnnnnnnnnnnnnnnnnnnnnnnnnnnnnnnnnnnnnnnnnnnnnnnnnnnnnnnnnnnnnnnnnnnnnnnnnnnnnnnnnnnnnnnnnnnnnnnnnnnnnnnnnnnnnnnnnnnnnnnnnnnnnnnnnnnnnnnnnnnnnnnnnnnnnnnnnnnnnnnnnnnnnnnnnnnnnnnnnnnnnnnnnnnnnnnnnnnnnnnnnnnnnnnnnnnnnnnnnnnnnnnnnnnnnnnnnnnnnnnnnnnnnnnnnnnnnnnnnnnnnnnnnnnnnnnnnnnnnnnnnnnnnnnnnnnnnnnnnnnnnnnnnnnnnnnnnnnnnnnnnnnnnnnnnnnnnnnnnnnnnnnnnnnnnnnnnnnnnnnnnnnnnnnnnnnnnnnnnnnnnnnnnnnnnnnnnnnnnnnnnnnnnnnnnnnnnnnnnnnnnnnnnnnnnnnnnnnnnnnnnnnnnnnnnnnnnnnnnnnnnnnnnnnnnnnnnnnnnnnnnnnnnnnnnnnnnnnnnnnnnnnnnnnnnnnnnnnnnnnnnnnnnnnnnnnnnnnnnnnnnnnnnnnnnnnnnnnnnnnnnnnnnnnnnnnnnnnnnnnnnnnnnnnnnnnnnnnnnnnnnnnnnnnnnnnnnnnnnnnnnnnnnnnnnnnnnnnnnnnnnnnnnnnnnnnnnnnnnnnnnnnnnnnnnnnnnnnnnnnnnnnnnnnnnnnnnnnnnnnnnnnnnnnnnnnnnnnnnnnnnnnnnnnnnnnnnnnnnnnnnnnnnnnnnnnnnnnnnnnnnnnnnnnnnnnnnnnnnnnnnnnnnnnnnnnnnnnnnnnnnnnnnnnnnnnnnnnnnnnnnnnnnnnnnnnnnnnnnnnnnnnnnnnnnnnnnnnnnnnnnnnnnnnnnnnnnnnnnnnnnnnnnnnnnnnnnnnnnnnnnnnnnnnnnnnnnnnnnnnnnnnnnnnnnnnnnnnnnnnnnnnnnnnnnnnnnnnnnnnnnnnnnnnnnnnnnnnnnnnnnnnnnnnnnnnnnnnnnnnnnnnnnnnnnnnnnnnnnnnnnnnnnnnnnnnnnnnnnnnnnnnnnnnnnnnnnnnnnnnnnnnnnnnnnnnnnnnnnnnnnnnnnnnnnnnnnnnnnnnnnnnnnnnnnnnnnnnnnnnnnnnnnnnnnnnnnnnnnnnnnnnnnnnnnnnnnnnnnnnnnnnnnnnnnnnnnnnnnnnnnnnnnnnnnnnnnnnnnnnnnnnnnnnnnnnnnnnnnnnnnnnnnnnnnnnnnnnnnnnnnnnnnnnnnnnnnnnnnnnnnnnnnnnnnnnnnnnnnnnnnnnnnnnnnnnnnnnnnnnnnnnnnnnnnnnnnnnnnnnnnnnnnnnnnnnnnnnnnnnnnnnnnnnnnnnnnnnnnnnnnnnnnnnnnnnnnnnnnnnnnnnnnnnnnnnnnnnnnnnnnnnnnnnnnnnnnnnnnnnnnnnnnnnnnnnnnnnnnnnnnnnnnnnnnnnnnnnnnnnnnnnnnnnnnnnnnnnnnnnnnnnnnnnnnnnnnnnnnnnnnnnnnnnnnnnnnnnnnnnnnnnnnnnnnnnnnnnnnnnnnnnnnnnnnnnnnnnnnnnnnnnnnnnnnnnnnnnnnnnnnnnnnnnnnnnnnnnnnnnnnnnnnnnnnnnnnnnnnnnnnnnnnnnnnnnnnnnnnnnnnnnnnnnnnnnnnnnnnnnnnnnnnnnnnnnnnnnnnnnnnnnnnnnnnnnnnnnnnnnnnnnnnnnnnnnnnnnnnnnnnnnnnnnnnnnnnnnnnnnnnnnnnnnnnnnnnnnnnnnnnnnnnnnnnnnnnnnnnnnnnnnnnnnnnnnnnnnnnnnnnnnnnnnnnnnnnnnnnnnnnnnnnnnnnnnnnnnnnnnnnnnnnnnnnnnnnnnnnnnnnnnnnnnnnnnnnnnnnnnnnnnnnnnnnnnnnnnnnnnnnnnnnnnnnnnnnnnnnnnnnnnnnnnnnnnnnnnnnnnnnnnnnnnnnnnnnnnnnnnnnnnnnnnnnnnnnnnnnnnnnnnnnnnnnnnnnnnnnnnnnnnnnnnnnnnnnnnnnnnnnnnnnnnnnnnnnnnnnnnnnnnnnnnnnnnnnnnnnnnnnnnnnnnnnnnnnnnnnnnnnnnnnnnnnnnnnnnnnnnnnnnnnnnnnnnnnnnnnnnnnnnnnnnnnnnnnnnnnnnnnnnnnnnnnnnnnnnnnnnnnnnnnnnnnnnnnnnnnnnnnnnnnnnnnnnnnnnnnnnnnnnnnnnnnnnnnnnnnnnnnnnnnnnnnnnnnnnnnnnnnnnnnnnnnnnnnnnnnnnnnnnnnnnnnnnnnnnnnnnnnnnnnnnnnnnnnnnnnnnnnnnnnnnnnnnnnnnnnnnnnnnnnnnnnnnnnnnnnnnnnnnnnnnnnnnnnnnnnnnnnnnnnnnnnnnnnnnnnnnnnnnnnnnnnnnnnnnnnnnnnnnnnnnnnnnnnnnnnnnnnnnnnnnnnnnnnnnnnnnnnnnnnnnnnnnnnnnnnnnnnnnnnnnnnnnnnnnnnnnnnnnnnnnnnnnnnnnnnnnnnnnnnnnnnnnnnnnnnnnnnnnnnnnnnnnnnnnnnnnnnnnnnnnnnnnnnnnnnnnnnnnnnnnnnnnnnnnnnnnnnnnnnnnnnnnnnnnnnnnnnnnnnnnnnnnnnnnnnnnnnnnnnnnnnnnnnnnnnnnnnnnnnnnnnnnnnnnnnnnnnnnnnnnnnnnnnnnnnnnnnnnnnnnnnnnnnnnnnnnnnnnnnnnnnnnnnnnnnnnnnnnnnnnnnnnnnnnnnnnnnnnnnnnnnnnnnnnnnnnnnnnnnnnnnnnnnnnnnnnnnnnnnnnnnnnnnnnnnnnnnnnnnnnnnnnnnnnnnnnnnnnnnnnnnnnnnnnnnnnnnnnnnnnnnnnnnnnnnnnnnnnnnnnnnnnnnnnnnnnnnnnnnnnnnnnnnnnnnnnnnnnnnnnnnnnnnnnnnnnnnnnnnnnnnnnnnnnnnnnnnnnnnnnnnnnnnnnnnnnnnnnnnnnnnnnnnnnnnnnnnnnnnnnnnnnnnnnnnnnnnnnnnnnnnnnnnnnnnnnnnnnnnnnnnnnnnnnnnnnnnnnnnnnnnnnnnnnnnnnnnnnnnnnnnnnnnnnnnnnnnnnnnnnnnnnnnnnnnnnnnnnnnnnnnnnnnnnnnnnnnnnnnnnnnnnnnnnnnnnnnnnnnnnnnnnnnnnnnnnnnnnnnnnnnnnnnnnnnnnnnnnnnnnnnnnnnnnnnnnnnnnnnnnnnnnnnnnnnnnnnnnnnnnnnnnnnnnnnnnnnnnnnnnnnnnnnnnnnnnnnnnnnnnnnnnnnnnnnnnnnnnnnnnnnnnnnnnnnnnnnnnnnnnnnnnnnnnnnnnnnnnnnnnnnnnnnnnnnnnnnnnnnnnnnnnnnnnnnnnnnnnnnnnnnnnnnnnnnnnnnnnnnnnnnnnnnnnnnnnnnnnnnnnnnnnnnnnnnnnnnnnnnnnnnnnnnnnnnnnnnnnnnnnnnnnnnnnnnnnnnnnnnnnnnnnnnnnnnnnnnnnnnnnnnnnnnnnnnnnnnnnnnnnnnnnnnnnnnnnnnnnnnnnnnnnnnnnnnnnnnnnnnnnnnnnnnnnnnnnnnnnnnnnnnnnnnnnnnnnnnnnnnnnnnnnnnnnnnnnnnnnnnnnnnnnnnnnnnnnnnnnnnnnnnnnnnnnnnnnnnnnnnnnnnnnnnnnnnnnnnnnnnnnnnnnnnnnnnnnnnnnnnnnnnnnnnnnnnnnnnnnnnnnnnnnnnnnnnnnnnnnnnnnnnnnnnnnnnnnnnnnnnnnnnnnnnnnnnnnnnnnnnnnnnnnnnnnnnnnnnnnnnnnnnnnnnnnnnnnnnnnnnnnnnnnnnnnnnnnnnnnnnnnnnnnnnnnnnnnnnnnnnnnnnnnnnnnnnnnnnnnnnnnnnnnnnnnnnnnnnnnnnnnnnnnnnnnnnnnnnnnnnnnnnnnnnnnnnnnnnnnnnnnnnnnnnnnnnnnnnnnnnnnnnnnnnnnnnnnnnnnnnnnnnnnnnnnnnnnnnnnnnnnnnnnnnnnnnnnnnnnnnnnnnnnnnnnnnnnnnnnnnnnnnnnnnnnnnnnnnnnnnnnnnnnnnnnnnnnnnnnnnnnnnnnnnnnnnnnnnnnnnnnnnnnnnnnnnnnnnnnnnnnnnnnnnnnnnnnnnnnnnnnnnnnnnnnnnnnnnnnnnnnnnnnnnnnnnnnnnnnnnnnnnnnnnnnnnnnnnnnnnnnnnnnnnnnnnnnnnnnnnnnnnnnnnnnnnnnnnnnnnnnnnnnnnnnnnnnnnnnnnnnnnnnnnnnnnnnnnnnnnnnnnnnnnnnnnnnnnnnnnnnnnnnnnnnnnnnnnnnnnnnnnnnnnnnnnnnnnnnnnnnnnnnnnnnnnnnnnnnnnnnnnnnnnnnnnnnnnnnnnnnnnnnnnnnnnnnnnnnnnnnnnnnnnnnnnnnnnnnnnnnnnnnnnnnnnnnnnnnnnnnnnnnnnnnnnnnnnnnnnnnnnnnnnnnnnnnnnnnnnnnnnnnnnnnnnnnnnnnnnnnnnnnnnnnnnnnnnnnnnnnnnnnnnnnnnnnnnnnnnnnnnnnnnnnnnnnnnnnnnnnnnnnnnnnnnnnnnnnnnnnnnnnnnnnnnnnnnnnnnnnnnnnnnnnnnnnnnnnnnnnnnnnnnnnnnnnnnnnnnnnnnnnnnnnnnnnnnnnnnnnnnnnnnnnnnnnnnnnnnnnnnnnnnnnnnnnnnnnnnnnnnnnnnnnnnnnnnnnnnnnnnnnnnnnnnnnnnnnnnnnnnnnnnnnnnnnnnnnnnnnnnnnnnnnnnnnnnnnnnnnnnnnnnnnnnnnnnnnnnnnnnnnnnnnnnnnnnnnnnnnnnnnnnnnnnnnnnnnnnnnnnnnnnnnnnnnnnnnnnnnnnnnnnnnnnnnnnnnnnnnnnnnnnnnnnnnnnnnnnnnnnnnnnnnnnnnnnnnnnnnnnnnnnnnnnnnnnnnnnnnnnnnnnnnnnnnnnnnnnnnnnnnnnnnnnnnnnnnnnnnnnnnnnnnnnnnnnnnnnnnnnnnnnnnnnnnnnnnnnnnnnnnnnnnnnnnnnnnnnnnnnnnnnnnnnnnnnnnnnnnnnnnnnnnnnnnnnnnnnnnnnnnnnnnnnnnnnnnnnnnnnnnnnnnnnnnnnnnnnnnnnnnnnnnnnnnnnnnnnnnnnnnnnnnnnnnnnnnnnnnnnnnnnnnnnnnnnnnnnnnnnnnnnnnnnnnnnnnnnnnnnnnnnnnnnnnnnnnnnnnnnnnnnnnnnnnnnnnnnnnnnnnnnnnnnnnnnnnnnnnnnnnnnnnnnnnnnnnnnnnnnnnnnnnnnnnnnnnnnnnnnnnnnnnnnnnnnnnnnnnnnnnnnnnnnnnnnnnnnnnnnnnnnnnnnnnnnnnnnnnnnnnnnnnnnnnnnnnnnnnnnnnnnnnnnnnnnnnnnnnnnnnnnnnnnnnnnnnnnnnnnnnnnnnnnnnnnnnnnnnnnnnnnnnnnnnnnnnnnnnnnnnnnnnnnnnnnnnnnnnnnnnnnnnnnnnnnnnnnnnnnnnnnnnnnnnnnnnnnnnnnnnnnnnnnnnnnnnnnnnnnnnnnnnnnnnnnnnnnnnnnnnnnnnnnnnnnnnnnnnnnnnnnnnnnnnnnnnnnnnnnnnnnnnnnnnnnnnnnnnnnnnnnnnnnnnnnnnnnnnnnnnnnnnnnnnnnnnnnnnnnnnnnnnnnnnnnnnnnnnnnnnnnnnnnnnnnnnnnnnnnnnnnnnnnnnnnnnnnnnnnnnnnnnnnnnnnnnnnnnnnnnnnnnnnnnnnnnnnnnnnnnnnnnnnnnnnnnnnnnnnnnnnnnnnnnnnnnnnnnnnnnnnnnnnnnnnnnnnnnnnnnnnnnnnnnnnnnnnnnnnnnnnnnnnnnnnnnnnnnnnnnnnnnnnnnnnnnnnnnnnnnnnnnnnnnnnnnnnnnnnnnnnnnnnnnnnnnnnnnnnnnnnnnnnnnnnnnnnnnnnnnnnnnnnnnnnnnnnnnnnnnnnnnnnnnnnnnnnnnnnnnnnnnnnnnnnnnnnnnnnnnnnnnnnnnnnnnnnnnnnnnnnnnnnnnnnnnnnnnnnnnnnnnnnnnnnnnnnnnnnnnnnnnnnnnnnnnnnnnnnnnnnnnnnnnnnnnnnnnnnnnnnnnnnnnnnnnnnnnnnnnnnnnnnnnnnnnnnnnnnnnnnnnnnnnnnnnnnnnnnnnnnnnnnnnnnnnnnnnnnnnnnnnnnnnnnnnnnnnnnnnnnnnnnnnnnnnnnnnnnnnnnnnnnnnnnnnnnnnnnnnnnnnnnnnnnnnnnnnnnnnnnnnnnnnnnnnnnnnnnnnnnnnnnnnnnnnnnnnnnnnnnnnnnnnnnnnnnnnnnnnnnnnnnnnnnnnnnnnnnnnnnnnnnnnnnnnnnnnnnnnnnnnnnnnnnnnnnnnnnnnnnnnnnnnnnnnnnnnnnnnnnnnnnnnnnnnnnnnnnnnnnnnnnnnnnnnnnnnnnnnnnnnnnnnnnnnnnnnnnnnnnnnnnnnnnnnnnnnnnnnnnnnnnnnnnnnnnnnnnnnnnnnnnnnnnnnnnnnnnnnnnnnnnnnnnnnnnnnnnnnnnnnnnnnnnnnnnnnnnnnnnnnnnnnnnnnnnnnnnnnnnnnnnnnnnnnnnnnnnnnnnnnnnnnnnnnnnnnnnnnnnnnnnnnnnnnnnnnnnnnnnnnnnnnnnnnnnnnnnnnnnnnnnnnnnnnnnnnnnnnnnnnnnnnnnnnnnnnnnnnnnnnnnnnnnnnnnnnnnnnnnnnnnnnnnnnnnnnnnnnnnnnnnnnnnnnnnnnnnnnnnnnnnnnnnnnnnnnnnnnnnnnnnnnnnnnnnnnnnnnnnnnnnnnnnnnnnnnnnnnnnnnnnnnnnnnnnnnnnnnnnnnnnnnnnnnnnnnnnnnnnnnnnnnnnnnnnnnnnnnnnnnnnnnnnnnnnnnnnnnnnnnnnnnnnnnnnnnnnnnnnnnnnnnnnnnnnnnnnnnnnnnnnnnnnnnnnnnnnnnnnnnnnnnnnnnnnnnnnnnnnnnnnnnnnnnnnnnnnnnnnnnnnnnnnnnnnnnnnnnnnnnnnnnnnnnnnnnnnnnnnnnnnnnnnnnnnnnnnnnnnnnnnnnnnnnnnnnnnnnnnnnnnnnnnnnnnnnnnnnnnnnnnnnnnnnnnnnnnnnnnnnnnnnnnnnnnnnnnnnnnnnnnnnnnnnnnnnnnnnnnnnnnnnnnnnnnnnnnnnnnnnnnnnnnnnnnnnnnnnnnnnnnnnnnnnnnnnnnnnnnnnnnnnnnnnnnnnnnnnnnnnnnnnnnnnnnnnnnnnnnnnnnnnnnnnnnnnnnnnnnnnnnnnnnnnnnnnnnnnnnnnnnnnnnnnnnnnnnnnnnnnnnnnnnnnnnnnnnnnnnnnnnnnnnnnnnnnnnnnnnnnnnnnnnnnnnnnnnnnnnnnnnnnnnnnnnnnnnnnnnnnnnnnnnnnnnnnnnnnnnnnnnnnnnnnnnnnnnnnnnnnnnnnnnnnnnnnnnnnnnnnnnnnnnnnnnnnnnnnnnnnnnnnnnnnnnnnnnnnnnnnnnnnnnnnnnnnnnnnnnnnnnnnnnnnnnnnnnnnnnnnnnnnnnnnnnnnnnnnnnnnnnnnnnnnnnnnnnnnnnnnnnnnnnnnnnnnnnnnnnnnnnnnnnnnnnnnnnnnnnnnnnnnnnnnnnnnnnnnnnnnnnnnnnnnnnnnnnnnnnnnnnnnnnnnnnnnnnnnnnnnnnnnnnnnnnnnnnnnnnnnnnnnnnnnnnnnnnnnnnnnnnnnnnnnnnnnnnnnnnnnnnnnnnnnnnnnnnnnnnnnnnnnnnnnnnnnnnnnnnnnnnnnnnnnnnnnnnnnnnnnnnnnnnnnnnnnnnnnnnnnnnnnnnnnnnnnnnnnnnnnnnnnnnnnnnnnnnnnnnnnnnnnnnnnnnnnnnnnnnnnnnnnnnnnnnnnnnnnnnnnnnnnnnnnnnnnnnnnnnnnnnnnnnnnnnnnnnnnnnnnnnnnnnnnnnnnnnnnnnnnnnnnnnnnnnnnnnnnnnnnnnnnnnnnnnnnnnnnnnnnnnnnnnnnnnnnnnnnnnnnnnnnnnnnnnnnnnnnnnnnnnnnnnnnnnnnnnnnnnnnnnnnnnnnnnnnnnnnnnnnnnnnnnnnnnnnnnnnnnnnnnnnnnnnnnnnnnnnnnnnnnnnnnnnnnnnnnnnnnnnnnnnnnnnnnnnnnnnnnnnnnnnnnnnnnnnnnnnnnnnnnnnnnnnnnnnnnnnnnnnnnnnnnnnnnnnnnnnnnnnnnnnnnnnnnnnnnnnnnnnnnnnnnnnnnnnnnnnnnnnnnnnnnnnnnnnnnnnnnnnnnnnnnnnnnnnnnnnnnnnnnnnnnnnnnnnnnnnnnnnnnnnnnnnnnnnnnnnnnnnnnnnnnnnnnnnnnnnnnnnnnnnnnnnnnnnnnnnnnnnnnnnnnnnnnnnnnnnnnnnnnnnnnnnnnnnnnnnnnnnnnnnnnnnnnnnnnnnnnnnnnnnnnnnnnnnnnnnnnnnnnnnnnnnnnnnnnnnnnnnnnnnnnnnnnnnnnnnnnnnnnnnnnnnnnnnnnnnnnnnnnnnnnnnnnnnnnnnnnnnnnnnnnnnnnnnnnnnnnnnnnnnnnnnnnnnnnnnnnnnnnnnnnnnnnnnnnnnnnnnnnnnnnnnnnnnnnnnnnnnnnnnnnnnnnnnnnnnnnnnnnnnnnnnnnnnnnnnnnnnnnnnnnnnnnnnnnnnnnnnnnnnnnnnnnnnnnnnnnnnnnnnnnnnnnnnnnnnnnnnnnnnnnnnnnnnnnnnnnnnnnnnnnnnnnnnnnnnnnnnnnnnnnnnnnnnnnnnnnnnnnnnnnnnnnnnnnnnnnnnnnnnnnnnnnnnnnnnnnnnnnnnnnnnnnnnnnnnnnnnnnnnnnnnnnnnnnnnnnnnnnnnnnnnnnnnnnnnnnnnnnnnnnnnnnnnnnnnnnnnnnnnnnnnnnnnnnnnnnnnnnnnnnnnnnnnnnnnnnnnnnnnnnnnnnnnnnnnnnnnnnnnnnnnnnnnnnnnnnnnnnnnnnnnnnnnnnnnnnnnnnnnnnnnnnnnnnnnnnnnnnnnnnnnnnnnnnnnnnnnnnnnnnnnnnnnnnnnnnnnnnnnnnnnnnnnnnnnnnnnnnnnnnnnnnnnnnnnnnnnnnnnnnnnnnnnnnnnnnnnnnnnnnnnnnnnnnnnnnnnnnnnnnnnnnnnnnnnnnnnnnnnnnnnnnnnnnnnnnnnnnnnnnnnnnnnnnnnnnnnnnnnnnnnnnnnnnnnnnnnnnnnnnnnnnnnnnnnnnnnnnnnnnnnnnnnnnnnnnnnnnnnnnnnnnnnnnnnnnnnnnnnnnnnnnnnnnnnnnnnnnnnnnnnnnnnnnnnnnnnnnnnnnnnnnnnnnnnnnnnnnnnnnnnnnnnnnnnnnnnnnnnnnnnnnnnnnnnnnnnnnnnnnnnnnnnnnnnnnnnnnnnnnnnnnnnnnnnnnnnnnnnnnnnnnnnnnnnnnnnnnnnnnnnnnnnnnnnnnnnnnnnnnnnnnnnnnnnnnnnnnnnnnnnnnnnnnnnnnnnnnnnnnnnnnnnnnnnnnnnnnnnnnnnnnnnnnnnnnnnnnnnnnnnnnnnnnnnnnnnnnnnnnnnnnnnnnnnnnnnnnnnnnnnnnnnnnnnnnnnnnnnnnnnnnnnnnnnnnnnnnnnnnnnnnnnnnnnnnnnnnnnnnnnnnnnnnnnnnnnnnnnnnnnnnnnnnnnnnnnnnnnnnnnnnnnnnnnnnnnnnnnnnnnnnnnnnnnnnnnnnnnnnnnnnnnnnnnnnnnnnnnnnnnnnnnnnnnnnnnnnnnnnnnnnnnnnnnnnnnnnnnnnnnnnnnnnnnnnnnnnnnnnnnnnnnnnnnnnnnnnnnnnnnnnnnnnnnnnnnnnnnnnnnnnnnnnnnnnnnnnnnnnnnnnnnnnnnnnnnnnnnnnnnnnnnnnnnnnnnnnnnnnnnnnnnnnnnnnnnnnnnnnnnnnnnnnnnnnnnnnnnnnnnnnnnnnnnnnnnnnnnnnnnnnnnnnnnnnnnnnnnnnnnnnnnnnnnnnnnnnnnnnnnnnnnnnnnnnnnnnnnnnnnnnnnnnnnnnnnnnnnnnnnnnnnnnnnnnnnnnnnnnnnnnnnnnnnnnnnnnnnnnnnnnnnnnnnnnnnnnnnnnnnnnnnnnnnnnnnnnnnnnnnnnnnnnnnnnnnnnnnnnnnnnnnnnnnnnnnnnnnnnnnnnnnnnnnnnnnnnnnnnnnnnnnnnnnnnnnnnnnnnnnnnnnnnnnnnnnnnnnnnnnnnnnnnnnnnnnnnnnnnnnnnnnnnnnnnnnnnnnnnnnnnnnnnnnnnnnnnnnnnnnnnnnnnnnnnnnnnnnnnnnnnnnnnnnnnnnnnnnnnnnnnnnnnnnnnnnnnnnnnnnnnnnnnnnnnnnnnnnnnnnnnnnnnnnnnnnnnnnnnnnnnnnnnnnnnnnnnnnnnnnnnnnnnnnnnnnnnnnnnnnnnnnnnnnnnnnnnnnnnnnnnnnnnnnnnnnnnnnnnnnnnnnnnnnnnnnnnnnnnnnnnnnnnnnnnnnnnnnnnnnnnnnnnnnnnnnnnnnnnnnnnnnnnnnnnnnnnnnnnnnnnnnnnnnnnnnnnnnnnnnnnnnnnnnnnnnnnnnnnnnnnnnnnnnnnnnnnnnnnnnnnnnnnnnnnnnnnnnnnnnnnnnnnnnnnnnnnnnnnnnnnnnnnnnnnnnnnnnnnnnnnnnnnnnnnnnnnnnnnnnnnnnnnnnnnnnnnnnnnnnnnnnnnnnnnnnnnnnnnnnnnnnnnnnnnnnnnnnnnnnnnnnnnnnnnnnnnnnnnnnnnnnnnnnnnnnnnnnnnnnnnnnnnnnnnnnnnnnnnnnnnnnnnnnnnnnnnnnnnnnnnnnnnnnnnnnnnnnnnnnnnnnnnnnnnnnnnnnnnnnnnnnnnnnnnnnnnnnnnnnnnnnnnnnnnnnnnnnnnnnnnnnnnnnnnnnnnnnnnnnnnnnnnnnnnnnnnnnnnnnnnnnnnnnnnnnnnnnnnnnnnnnnnnnnnnnnnnnnnnnnnnnnnnnnnnnnnnnnnnnnnnnnnnnnnnnnnnnnnnnnnnnnnnnnnnnnnnnnnnnnnnnnnnnnnnnnnnnnnnnnnnnnnnnnnnnnnnnnnnnnnnnnnnnnnnnnnnnnnnnnnnnnnnnnnnnnnnnnnnnnnnnnnnnnnnnnnnnnnnnnnnnnnnnnnnnnnnnnnnnnnnnnnnnnnnnnnnnnnnnnnnnnnnnnnnnnnnnnnnnnnnnnnnnnnnnnnnnnnnnnnnnnnnnnnnnnnnnnnnnnnnnnnnnnnnnnnnnnnnnnnnnnnnnnnnnnnnnnnnnnnnnnnnnnnnnnnnnnnnnnnnnnnnnnnnnnnnnnnnnnnnnnnnnnnnnnnnnnnnnnnnnnnnnnnnnnnnnnnnnnnnnnnnnnnnnnnnnnnnnnnnnnnnnnnnnnnnnnnnnnnnnnnnnnnnnnnnnnnnnnnnnnnnnnnnnnnnnnnnnnnnnnnnnnnnnnnnnnnnnnnnnnnnnnnnnnnnnnnnnnnnnnnnnnnnnnnnnnnnnnnnnnnnnnnnnnnnnnnnnnnnnnnnnnnnnnnnnnnnnnnnnnnnnnnnnnnnnnnnnnnnnnnnnnnnnnnnnnnnnnnnnnnnnnnnnnnnnnnnnnnnnnnnnnnnnnnnnnnnnnnnnnnnnnnnnnnnnnnnnnnnnnnnnnnnnnnnnnnnnnnnnnnnnnnnnnnnnnnnnnnnnnnnnnnnnnnnnnnnnnnnnnnnnnnnnnnnnnnnnnnnnnnnnnnnnnnnnnnnnnnnnnnnnnnnnnnnnnnnnnnnnnnnnnnnnnnnnnnnnnnnnnnnnnnnnnnnnnnnnnnnnnnnnnnnnnnnnnnnnnnnnnnnnnnnnnnnnnnnnnnnnnnnnnnnnnnnnnnnnnnnnnnnnnnnnnnnnnnnnnnnnnnnnnnnnnnnnnnnnnnnnnnnnnnnnnnnnnnnnnnnnnnnnnnnnnnnnnnnnnnnnnnnnnnnnnnnnnnnnnnnnnnnnnnnnnnnnnnnnnnnnnnnnnnnnnnnnnnnnnnnnnnnnnnnnnnnnnnnnnnnnnnnnnnnnnnnnnnnnnnnnnnnnnnnnnnnnnnnnnnnnnnnnnnnnnnnnnnnnnnnnnnnnnnnnnnnnnnnnnnnnnnnnnnnnnnnnnnnnnnnnnnnnnnnnnnnnnnnnnnnnnnnnnnnnnnnnnnnnnnnnnnnnnnnnnnnnnnnnnnnnnnnnnnnnnnnnnnnnnnnnnnnnnnnnnnnnnnnnnnnnnnnnnnnnnnnnnnnnnnnnnnnnnnnnnnnnnnnnnnnnnnnnnnnnnnnnnnnnnnnnnnnnnnnnnnnnnnnnnnnnnnnnnnnnnnnnnnnnnnnnnnnnnnnnnnnnnnnnnnnnnnnnnnnnnnnnnnnnnnnnnnnnnnnnnnnnnnnnnnnnnnnnnnnnnnnnnnnnnnnnnnnnnnnnnnnnnnnnnnnnnnnnnnnnnnnnnnnnnnnnnnnnnnnnnnnnnnnnnnnnnnnnnnnnnnnnnnnnnnnnnnnnnnnnnnnnnnnnnnnnnnnnnnnnnnnnnnnnnnnnnnnnnnnnnnnnnnnnnnnnnnnnnnnnnnnnnnnnnnnnnnnnnnnnnnnnnnnnnnnnnnnnnnnnnnnnnnnnnnnnnnnnnnnnnnnnnnnnnnnnnnnnnnnnnnnnnnnnnnnnnnnnnnnnnnnnnnnnnnnnnnnnnnnnnnnnnnnnnnnnnnnnnnnnnnnnnnnnnnnnnnnnnnnnnnnnnnnnnnnnnnnnnnnnnnnnnnnnnnnnnnnnnnnnnnnnnnnnnnnnnnnnnnnnnnnnnnnnnnnnnnnnnnnnnnnnnnnnnnnnnnnnnnnnnnnnnnnnnnnnnnnnnnnnnnnnnnnnnnnnnnnnnnnnnnnnnnnnnnnnnnnnnnnnnnnnnnnnnnnnnnnnnnnnnnnnnnnnnnnnnnnnnnnnnnnnnnnnnnnnnnnnnnnnnnnnnnnnnnnnnnnnnnnnnnnnnnnnnnnnnnnnnnnnnnnnnnnnnnnnnnnnnnnnnnnnnnnnnnnnnnnnnnnnnnnnnnnnnnnnnnnnnnnnnnnnnnnnnnnnnnnnnnnnnnnnnnnnnnnnnnnnnnnnnnnnnnnnnnnnnnnnnnnnnnnnnnnnnnnnnnnnnnnnnnnnnnnnnnnnnnnnnnnnnnnnnnnnnnnnnnnnnnnnnnnnnnnnnnnnnnnnnnnnnnnnnnnnnnnnnnnnnnnnnnnnnnnnnnnnnnnnnnnnnnnnnnnnnnnnnnnnnnnnnnnnnnnnnnnnnnnnnnnnnnnnnnnnnnnnnnnnnnnnnnnnnnnnnnnnnnnnnnnnnnnnnnnnnnnnnnnnnnnnnnnnnnnnnnnnnnnnnnnnnnnnnnnnnnnnnnnnnnnnnnnnnnnnnnnnnnnnnnnnnnnnnnnnnnnnnnnnnnnnnnnnnnnnnnnnnnnnnnnnnnnnnnnnnnnnnnnnnnnnnnnnnnnnnnnnnnnnnnnnnnnnnnnnnnnnnnnnnnnnnnnnnnnnnnnnnnnnnnnnnnnnnnnnnnnnnnnnnnnnnnnnnnnnnnnnnnnnnnnnnnnnnnnnnnnnnnnnnnnnnnnnnnnnnnnnnnnnnnnnnnnnnnnnnnnnnnnnnnnnnnnnnnnnnnnnnnnnnnnnnnnnnnnnnnnnnnnnnnnnnnnnnnnnnnnnnnnnnnnnnnnnnnnnnnnnnnnnnnnnnnnnnnnnnnnnnnnnnnnnnnnnnnnnnnnnnnnnnnnnnnnnnnnnnnnnnnnnnnnnnnnnnnnnnnnnnnnnnnnnnnnnnnnnnnnnnnnnnnnnnnnnnnnnnnnnnnnnnnnnnnnnnnnnnnnnnnnnnnnnnnnnnnnnnnnnnnnnnnnnnnnnnnnnnnnnnnnnnnnnnnnnnnnnnnnnnnnnnnnnnnnnnnnnnnnnnnnnnnnnnnnnnnnnnnnnnnnnnnnnnnnnnnnnnnnnnnnnnnnnnnnnnnnnnnnnnnnnnnnnnnnnnnnnnnnnnnnnnnnnnnnnnnnnnnnnnnnnnnnnnnnnnnnnnnnnnnnnnnnnnnnnnnnnnnnnnnnnnnnnnnnnnnnnnnnnnnnnnnnnnnnnnnnnnnnnnnnnnnnnnnnnnnnnnnnnnnnnnnnnnnnnnnnnnnnnnnnnnnnnnnnnnnnnnnnnnnnnnnnnnnnnnnnnnnnnnnnnnnnnnnnnnnnnnnnnnnnnnnnnnnnnnnnnnnnnnnnnnnnnnnnnnnnnnnnnnnnnnnnnnnnnnnnnnnnnnnnnnnnnnnnnnnnnnnnnnnnnnnnnnnnnnnnnnnnnnnnnnnnnnnnnnnnnnnnnnnnnnnnnnnnnnnnnnnnnnnnnnnnnnnnnnnnnnnnnnnnnnnnnnnnnnnnnnnnnnnnnnnnnnnnnnnnnnnnnnnnnnnnnnnnnnnnnnnnnnnnnnnnnnnnnnnnnnnnnnnnnnnnnnnnnnnnnnnnnnnnnnnnnnnnnnnnnnnnnnnnnnnnnnnnnnnnnnnnnnnnnnnnnnnnnnnnnnnnnnnnnnnnnnnnnnnnnnnnnnnnnnnnnnnnnnnnnnnnnnnnnnnnnnnnnnnnnnnnnnnnnnnnnnnnnnnnnnnnnnnnnnnnnnnnnnnnnnnnnnnnnnnnnnnnnnnnnnnnnnnnnnnnnnnnnnnnnnnnnnnnnnnnnnnnnnnnnnnnnnnnnnnnnnnnnnnnnnnnnnnnnnnnnnnnnnnnnnnnnnnnnnnnnnnnnnnnnnnnnnnnnnnnnnnnnnnnnnnnnnnnnnnnnnnnnnnnnnnnnnnnnnnnnnnnnnnnnnnnnnnnnnnnnnnnnnnnnnnnnnnnnnnnnnnnnnnnnnnnnnnnnnnnnnnnnnnnnnnnnnnnnnnnnnnnnnnnnnnnnnnnnnnnnnnnnnnnnnnnnnnnnnnnnnnnnnnnnnnnnnnnnnnnnnnnnnnnnnnnnnnnnnnnnnnnnnnnnnnnnnnnnnnnnnnnnnnnnnnnnnnnnnnnnnnnnnnnnnnnnnnnnnnnnnnnnnnnnnnnnnnnnnnnnnnnnnnnnnnnnnnnnnnnnnnnnnnnnnnnnnnnnnnnnnnnnnnnnnnnnnnnnnnnnnnnnnnnnnnnnnnnnnnnnnnnnnnnnnnnnnnnnnnnnnnnnnnnnnnnnnnnnnnnnnnnnnnnnnnnnnnnnnnnnnnnnnnnnnnnnnnnnnnnnnnnnnnnnnnnnnnnnnnnnnnnnnnnnnnnnnnnnnnnnnnnnnnnnnnnnnnnnnnnnnnnnnnnnnnnnnnnnnnnnnnnnnnnnnnnnnnnnnnnnnnnnnnnnnnnnnnnnnnnnnnnnnnnnnnnnnnnnnnnnnnnnnnnnnnnnnnnnnnnnnnnnnnnnnnnnnnnnnnnnnnnnnnnnnnnnnnnnnnnnnnnnnnnnnnnnnnnnnnnnnnnnnnnnnnnnnnnnnnnnnnnnnnnnnnnnnnnnnnnnnnnnnnnnnnnnnnnnnnnnnnnnnnnnnnnnnnnnnnnnnnnnnnnnnnnnnnnnnnnnnnnnnnnnnnnnnnnnnnnnnnnnnnnnnnnnnnnnnnnnnnnnnnnnnnnnnnnnnnnnnnnnnnnnnnnnnnnnnnnnnnnnnnnnnnnnnnnnnnnnnnnnnnnnnnnnnnnnnnnnnnnnnnnnnnnnnnnnnnnnnnnnnnnnnnnnnnnnnnnnnnnnnnnnnnnnnnnnnnnnnnnnnnnnnnnnnnnnnnnnnnnnnnnnnnnnnnnnnnnnnnnnnnnnnnnnnnnnnnnnnnnnnnnnnnnnnnnnnnnnnnnnnnnnnnnnnnnnnnnnnnnnnnnnnnnnnnnnnnnnnnnnnnnnnnnnnnnnnnnnnnnnnnnnnnnnnnnnnnnnnnnnnnnnnnnnnnnnnnnnnnnnnnnnnnnnnnnnnnnnnnnnnnnnnnnnnnnnnnnnnnnnnnnnnnnnnnnnnnnnnnnnnnnnnnnnnnnnnnnnnnnnnnnnnnnnnnnnnnnnnnnnnnnnnnnnnnnnnnnnnnnnnnnnnnnnnnnnnnnnnnnnnnnnnnnnnnnnnnnnnnnnnnnnnnnnnnnnnnnnnnnnnnnnnnnnnnnnnnnnnnnnnnnnnnnnnnnnnnnnnnnnnnnnnnnnnnnnnnnnnnnnnnnnnnnnnnnnnnnnnnnnnnnnnnnnnnnnnnnnnnnnnnnnnnnnnnnnnnnnnnnnnnnnnnnnnnnnnnnnnnnnnnnnnnnnnnnnnnnnnnnnnnnnnnnnnnnnnnnnnnnnnnnnnnnnnnnnnnnnnnnnnnnnnnnnnnnnnnnnnnnnnnnnnnnnnnnnnnnnnnnnnnnnnnnnnnnnnnnnnnnnnnnnnnnnnnnnnnnnnnnnnnnnnnnnnnnnnnnnnnnnnnnnnnnnnnnnnnnnnnnnnnnnnnnnnnnnnnnnnnnnnnnnnnnnnnnnnnnnnnnnnnnnnnnnnnnnnnnnnnnnnnnnnnnnnnnnnnnnnnnnnnnnnnnnnnnnnnnnnnnnnnnnnnnnnnnnnnnnnnnnnnnnnnnnnnnnnnnnnnnnnnnnnnnnnnnnnnnnnnnnnnnnnnnnnnnnnnnnnnnnnnnnnnnnnnnnnnnnnnnnnnnnnnnnnnnnnnnnnnnnnnnnnnnnnnnnnnnnnnnnnnnnnnnnnnnnnnnnnnnnnnnnnnnnnnnnnnnnnnnnnnnnnnnnnnnnnnnnnnnnnnnnnnnnnnnnnnnnnnnnnnnnnnnnnnnnnnnnnnnnnnnnnnnnnnnnnnnnnnnnnnnnnnnnnnnnnnnnnnnnnnnnnnnnnnnnnnnnnnnnnnnnnnnnnnnnnnnnnnnnnnnnnnnnnnnnnnnnnnnnnnnnnnnnnnnnnnnnnnnnnnnnnnnnnnnnnnnnnnnnnnnnnnnnnnnnnnnnnnnnnnnnnnnnnnnnnnnnnnnnnnnnnnnnnnnnnnnnnnnnnnnnnnnnnnnnnnnnnnnnnnnnnnnnnnnnnnnnnnnnnnnnnnnnnnnnnnnnnnnnnnnnnnnnnnnnnnnnnnnnnnnnnnnnnnnnnnnnnnnnnnnnnnnnnnnnnnnnnnnnnnnnnnnnnnnnnnnnnnnnnnnnnnnnnnnnnnnnnnnnnnnnnnnnnnnnnnnnnnnnnnnnnnnnnnnnnnnnnnnnnnnnnnnnnnnnnnnnnnnnnnnnnnnnnnnnnnnnnnnnnnnnnnnnnnnnnnnnnnnnnnnnnnnnnnnnnnnnnnnnnnnnnnnnnnnnnnnnnnnnnnnnnnnnnnnnnnnnnnnnnnnnnnnnnnnnnnnnnnnnnnnnnnnnnnnnnnnnnnnnnnnnnnnnnnnnnnnnnnnnnnnnnnnnnnnnnnnnnnnnnnnnnnnnnnnnnnnnnnnnnnnnnnnnnnnnnnnnnnnnnnnnnnnnnnnnnnnnnnnnnnnnnnnnnnnnnnnnnnnnnnnnnnnnnnnnnnnnnnnnnnnnnnnnnnnnnnnnnnnnnnnnnnnnnnnnnnnnnnnnnnnnnnnnnnnnnnnnnnnnnnnnnnnnnnnnnnnnnnnnnnnnnnnnnnnnnnnnnnnnnnnnnnnnnnnnnnnnnnnnnnnnnnnnnnnnnnnnnnnnnnnnnnnnnnnnnnnnnnnnnnnnnnnnnnnnnnnnnnnnnnnnnnnnnnnnnnnnnnnnnnnnnnnnnnnnnnnnnnnnnnnnnnnnnnnnnnnnnnnnnnnnnnnnnnnnnnnnnnnnnnnnnnnnnnnnnnnnnnnnnnnnnnnnnnnnnnnnnnnnnnnnnnnnnnnnnnnnnnnnnnnnnnnnnnnnnnnnnnnnnnnnnnnnnnnnnnnnnnnnnnnnnnnnnnnnnnnnnnnnnnnnnnnnnnnnnnnnnnnnnnnnnnnnnnnnnnnnnnnnnnnnnnnnnnnnnnnnnnnnnnnnnnnnnnnnnnnnnnnnnnnnnnnnnnnnnnnnnnnnnnnnnnnnnnnnnnnnnnnnnnnnnnnnnnnnnnnnnnnnnnnnnnnnnnnnnnnnnnnnnnnnnnnnnnnnnnnnnnnnnnnnnnnnnnnnnnnnnnnnnnnnnnnnnnnnnnnnnnnnnnnnnnnnnnnnnnnnnnnnnnnnnnnnnnnnnnnnnnnnnnnnnnnnnnnnnnnnnnnnnnnnnnnnnnnnnnnnnnnnnnnnnnnnnnnnnnnnnnnnnnnnnnnnnnnnnnnnnnnnnnnnnnnnnnnnnnnnnnnnnnnnnnnnnnnnnnnnnnnnnnnnnnnnnnnnnnnnnnnnnnnnnnnnnnnnnnnnnnnnnnnnnnnnnnnnnnnnnnnnnnnnnnnnnnnnnnnnnnnnnnnnnnnnnnnnnnnnnnnnnnnnnnnnnnnnnnnnnnnnnnnnnnnnnnnnnnnnnnnnnnnnnnnnnnnnnnnnnnnnnnnnnnnnnnnnnnnnnnnnnnnnnnnnnnnnnnnnnnnnnnnnnnnnnnnnnnnnnnnnnnnnnnnnnnnnnnnnnnnnnnnnnnnnnnnnnnnnnnnnnnnnnnnnnnnnnnnnnnnnnnnnnnnnnnnnnnnnnnnnnnnnnnnnnnnnnnnnnnnnnnnnnnnnnnnnnnnnnnnnnnnnnnnnnnnnnnnnnnnnnnnnnnnnnnnnnnnnnnnnnnnnnnnnnnnnnnnnnnnnnnnnnnnnnnnnnnnnnnnnnnnnnnnnnnnnnnnnnnnnnnnnnnnnnnnnnnnnnnnnnnnnnnnnnnnnnnnnnnnnnnnnnnnnnnnnnnnnnnnnnnnnnnnnnnnnnnnnnnnnnnnnnnnnnnnnnnnnnnnnnnnnnnnnnnnnnnnnnnnnnnnnnnnnnnnnnnnnnnnnnnnnnnnnnnnnnnnnnnnnnnnnnnnnnnnnnnnnnnnnnnnnnnnnnnnnnnnnnnnnnnnnnnnnnnnnnnnnnnnnnnnnnnnnnnnnnnnnnnnnnnnnnnnnnnnnnnnnnnnnnnnnnnnnnnnnnnnnnnnnnnnnnnnnnnnnnnnnnnnnnnnnnnnnnnnnnnnnnnnnnnnnnnnnnnnnnnnnnnnnnnnnnnnnnnnnnnnnnnnnnnnnnnnnnnnnnnnnnnnnnnnnnnnnnnnnnnnnnnnnnnnnnnnnnnnnnnnnnnnnnnnnnnnnnnnnnnnnnnnnnnnnnnnnnnnnnnnnnnnnnnnnnnnnnnnnnnnnnnnnnnnnnnnnnnnnnnnnnnnnnnnnnnnnnnnnnnnnnnnnnnnnnnnnnnnnnnnnnnnnnnnnnnnnnnnnnnnnnnnnnnnnnnnnnnnnnnnnnnnnnnnnnnnnnnnnnnnnnnnnnnnnnnnnnnnnnnnnnnnnnnnnnnnnnnnnnnnnnnnnnnnnnnnnnnnnnnnnnnnnnnnnnnnnnnnnnnnnnnnnnnnnnnnnnnnnnnnnnnnnnnnnnnnnnnnnnnnnnnnnnnnnnnnnnnnnnnnnnnnnnnnnnnnnnnnnnnnnnnnnnnnnnnnnnnnnnnnnnnnnnnnnnnnnnnnnnnnnnnnnnnnnnnnnnnnnnnnnnnnnnnnnnnnnnnnnnnnnnnnnnnnnnnnnnnnnnnnnnnnnnnnnnnnnnnnnnnnnnnnnnnnnnnnnnnnnnnnnnnnnnnnnnnnnnnnnnnnnnnnnnnnnnnnnnnnnnnnnnnnnnnnnnnnnnnnnnnnnnnnnnnnnnnnnnnnnnnnnnnnnnnnnnnnnnnnnnnnnnnnnnnnnnnnnnnnnnnnnnnnnnnnnnnnnnnnnnnnnnnnnnnnnnnnnnnnnnnnnnnnnnnnnnnnnnnnnnnnnnnnnnnnnnnnnnnnnnnnnnnnnnnnnnnnnnnnnnnnnnnnnnnnnnnnnnnnnnnnnnnnnnnnnnnnnnnnnnnnnnnnnnnnnnnnnnnnnnnnnnnnnnnnnnnnnnnnnnnnnnnnnnnnnnnnnnnnnnnnnnnnnnnnnnnnnnnnnnnnnnnnnnnnnnnnnnnnnnnnnnnnnnnnnnnnnnnnnnnnnnnnnnnnnnnnnnnnnnnnnnnnnnnnnnnnnnnnnnnnnnnnnnnnnnnnnnnnnnnnnnnnnnnnnnnnnnnnnnnnnnnnnnnnnnnnnnnnnnnnnnnnnnnnnnnnnnnnnnnnnnnnnnnnnnnnnnnnnnnnnnnnnnnnnnnnnnnnnnnnnnnnnnnnnnnnnnnnnnnnnnnnnnnnnnnnnnnnnnnnnnnnnnnnnnnnnnnnnnnnnnnnnnnnnnnnnnnnnnnnnnnnnnnnnnnnnnnnnnnnnnnnnnnnnnnnnnnnnnnnnnnnnnnnnnnnnnnnnnnnnnnnnnnnnnnnnnnnnnnnnnnnnnnnnnnnnnnnnnnnnnnnnnnnnnnnnnnnnnnnnnnnnnnnnnnnnnnnnnnnnnnnnnnnnnnnnnnnnnnnnnnnnnnnnnnnnnnnnnnnnnnnnnnnnnnnnnnnnnnnnnnnnnnnnnnnnnnnnnnnnnnnnnnnnnnnnnnnnnnnnnnnnnnnnnnnnnnnnnnnnnnnnnnnnnnnnnnnnnnnnnnnnnnnnnnnnnnnnnnnnnnnnnnnnnnnnnnnnnnnnnnnnnnnnnnnnnnnnnnnnnnnnnnnnnnnnnnnnnnnnnnnnnnnnnnnnnnnnnnnnnnnnnnnnnnnnnnnnnnnnnnnnnnnnnnnnnnnnnnnnnnnnnnnnnnnnnnnnnnnnnnnnnnnnnnnnnnnnnnnnnnnnnnnnnnnnnnnnnnnnnnnnnnnnnnnnnnnnnnnnnnnnnnnnnnnnnnnnnnnnnnnnnnnnnnnnnnnnnnnnnnnnnnnnnnnnnnnnnnnnnnnnnnnnnnnnnnnnnnnnnnnnnnnnnnnnnnnnnnnnnnnnnnnnnnnnnnnnnnnnnnnnnnnnnnnnnnnnnnnnnnnnnnnnnnnnnnnnnnnnnnnnnnnnnnnnnnnnnnnnnnnnnnnnnnnnnnnnnnnnnnnnnnnnnnnnnnnnnnnnnnnnnnnnnnnnnnnnnnnnnnnnnnnnnnnnnnnnnnnnnnnnnnnnnnnnnnnnnnnnnnnnnnnnnnnnnnnnnnnnnnnnnnnnnnnnnnnnnnnnnnnnnnnnnnnnnnnnnnnnnnnnnnnnnnnnnnnnnnnnnnnnnnnnnnnnnnnnnnnnnnnnnnnnnnnnnnnnnnnnnnnnnnnnnnnnnnnnnnnnnnnnnnnnnnnnnnnnnnnnnnnnnnnnnnnnnnnnnnnnnnnnnnnnnnnnnnnnnnnnnnnnnnnnnnnnnnnnnnnnnnnnnnnnnnnnnnnnnnnnnnnnnnnnnnnnnnnnnnnnnnnnnnnnnnnnnnnnnnnnnnnnnnnnnnnnnnnnnnnnnnnnnnnnnnnnnnnnnnnnnnnnnnnnnnnnnnnnnnnnnnnnnnnnnnnnnnnnnnnnnnnnnnnnnnnnnnnnnnnnnnnnnnnnnnnnnnnnnnnnnnnnnnnnnnnnnnnnnnnnnnnnnnnnnnnnnnnnnnnnnnnnnnnnnnnnnnnnnnnnnnnnnnnnnnnnnnnnnnnnnnnnnnnnnnnnnnnnnnnnnnnnnnnnnnnnnnnnnnnnnnnnnnnnnnnnnnnnnnnnnnnnnnnnnnnnnnnnnnnnnnnnnnnnnnnnnnnnnnnnnnnnnnnnnnnnnnnnnnnnnnnnnnnnnnnnnnnnnnnnnnnnnnnnnnnnnnnnnnnnnnnnnnnnnnnnnnnnnnnnnnnnnnnnnnnnnnnnnnnnnnnnnnnnnnnnnnnnnnnnnnnnnnnnnnnnnnnnnnnnnnnnnnnnnnnnnnnnnnnnnnnnnnnnnnnnnnnnnnnnnnnnnnnnnnnnnnnnnnnnnnnnnnnnnnnnnnnnnnnnnnnnnnnnnnnnnnnnnnnnnnnnnnnnnnnnnnnnnnnnnnnnnnnnnnnnnnnnnnnnnnnnnnnnnnnnnnnnnnnnnnnnnnnnnnnnnnnnnnnnnnnnnnnnnnnnnnnnnnnnnnnnnnnnnnnnnnnnnnnnnnnnnnnnnnnnnnnnnnnnnnnnnnnnnnnnnnnnnnnnnnnnnnnnnnnnnnnnnnnnnnnnnnnnnnnnnnnnnnnnnnnnnnnnnnnnnnnnnnnnnnnnnnnnnnnnnnnnnnnnnnnnnnnnnnnnnnnnnnnnnnnnnnnnnnnnnnnnnnnnnnnnnnnnnnnnnnnnnnnnnnnnnnnnnnnnnnnnnnnnnnnnnnnnnnnnnnnnnnnnnnnnnnnnnnnnnnnnnnnnnnnnnnnnnnnnnnnnnnnnnnnnnnnnnnnnnnnnnnnnnnnnnnnnnnnnnnnnnnnnnnnnnnnnnnnnnnnnnnnnnnnnnnnnnnnnnnnnnnnnnnnnnnnnnnnnnnnnnnnnnnnnnnnnnnnnnnnnnnnnnnnnnnnnnnnnnnnnnnnnnnnnnnnnnnnnnnnnnnnnnnnnnnnnnnnnnnnnnnnnnnnnnnnnnnnnnnnnnnnnnnnnnnnnnnnnnnnnnnnnnnnnnnnnnnnnnnnnnnnnnnnnnnnnnnnnnnnnnnnnnnnnnnnnnnnnnnnnnnnnnnnnnnnnnnnnnnnnnnnnnnnnnnnnnnnnnnnnnnnnnnnnnnnnnnnnnnnnnnnnnnnnnnnnnnnnnnnnnnnnnnnnnnnnnnnnnnnnnnnnnnnnnnnnnnnnnnnnnnnnnnnnnnnnnnnnnnnnnnnnnnnnnnnnnnnnnnnnnnnnnnnnnnnnnnnnnnnnnnnnnnnnnnnnnnnnnnnnnnnnnnnnnnnnnnnnnnnnnnnnnnnnnnnnnnnnnnnnnnnnnnnnnnnnnnnnnnnnnnnnnnnnnnnnnnnnnnnnnnnnnnnnnnnnnnnnnnnnnnnnnnnnnnnnnnnnnnnnnnnnnnnnnnnnnnnnnnnnnnnnnnnnnnnnnnnnnnnnnnnnnnnnnnnnnnnnnnnnnnnnnnnnnnnnnnnnnnnnnnnnnnnnnnnnnnnnnnnnnnnnnnnnnnnnnnnnnnnnnnnnnnnnnnnnnnnnnnnnnnnnnnnnnnnnnnnnnnnnnnnnnnnnnnnnnnnnnnnnnnnnnnnnnnnnnnnnnnnnnnnnnnnnnnnnnnnnnnnnnnnnnnnnnnnnnnnnnnnnnnnnnnnnnnnnnnnnnnnnnnnnnnnnnnnnnnnnnnnnnnnnnnnnnnnnnnnnnnnnnnnnnnnnnnnnnnnnnnnnnnnnnnnnnnnnnnnnnnnnnnnnnnnnnnnnnnnnnnnnnnnnnnnnnnnnnnnnnnnnnnnnnnnnnnnnnnnnnnnnnnnnnnnnnnnnnnnnnnnnnnnnnnnnnnnnnnnnnnnnnnnnnnnnnnnnnnnnnnnnnnnnnnnnnnnnnnnnnnnnnnnnnnnnnnnnnnnnnnnnnnnnnnnnnnnnnnnnnnnnnnnnnnnnnnnnnnnnnnnnnnnnnnnnnnnnnnnnnnnnnnnnnnnnnnnnnnnnnnnnnnnnnnnnnnnnnnnnnnnnnnnnnnnnnnnnnnnnnnnnnnnnnnnnnnnnnnnnnnnnnnnnnnnnnnnnnnnnnnnnnnnnnnnnnnnnnnnnnnnnnnnnnnnnnnnnnnnnnnnnnnnnnnnnnnnnnnnnnnnnnnnnnnnnnnnnnnnnnnnnnnnnnnnnnnnnnnnnnnnnnnnnnnnnnnnnnnnnnnnnnnnnnnnnnnnnnnnnnnnnnnnnnnnnnnnnnnnnnnnnnnnnnnnnnnnnnnnnnnnnnnnnnnnnnnnnnnnnnnnnnnnnnnnnnnnnnnnnnnnnnnnnnnnnnnnnnnnnnnnnnnnnnnnnnnnnnnnnnnnnnnnnnnnnnnnnnnnnnnnnnnnnnnnnnnnnnnnnnnnnnnnnnnnnnnnnnnnnnnnnnnnnnnnnnnnnnnnnnnnnnnnnnnnnnnnnnnnnnnnnnnnnnnnnnnnnnnnnnnnnnnnnnnnnnnnnnnnnnnnnnnnnnnnnnnnnnnnnnnnnnnnnnnnnnnnnnnnnnnnnnnnnnnnnnnnnnnnnnnnnnnnnnnnnnnnnnnnnnnnnnnnnnnnnnnnnnnnnnnnnnnnnnnnnnnnnnnnnnnnnnnnnnnnnnnnnnnnnnnnnnnnnnnnnnnnnnnnnnnnnnnnnnnnnnnnnnnnnnnnnnnnnnnnnnnnnnnnnnnnnnnnnnnnnnnnnnnnnnnnnnnnnnnnnnnnnnnnnnnnnnnnnnnnnnnnnnnnnnnnnnnnnnnnnnnnnnnnnnnnnnnnnnnnnnnnnnnnnnnnnnnnnnnnnnnnnnnnnnnnnnnnnnnnnnnnnnnnnnnnnnnnnnnnnnnnnnnnnnnnnnnnnnnnnnnnnnnnnnnnnnnnnnnnnnnnnnnnnnnnnnnnnnnnnnnnnnnnnnnnnnnnnnnnnnnnnnnnnnnnnnnnnnnnnnnnnnnnnnnnnnnnnnnnnnnnnnnnnnnnnnnnnnnnnnnnnnnnnnnnnnnnnnnnnnnnnnnnnnnnnnnnnnnnnnnnnnnnnnnnnnnnnnnnnnnnnnnnnnnnnnnnnnnnnnnnnnnnnnnnnnnnnnnnnnnnnnnnnnnnnnnnnnnnnnnnnnnnnnnnnnnnnnnnnnnnnnnnnnnnnnnnnnnnnnnnnnnnnnnnnnnnnnnnnnnnnnnnnnnnnnnnnnnnnnnnnnnnnnnnnnnnnnnnnnnnnnnnnnnnnnnnnnnnnnnnnnnnnnnnnnnnnnnnnnnnnnnnnnnnnnnnnnnnnnnnnnnnnnnnnnnnnnnnnnnnnnnnnnnnnnnnnnnnnnnnnnnnnnnnnnnnnnnnnnnnnnnnnnnnnnnnnnnnnnnnnnnnnnnnnnnnnnnnnnnnnnnnnnnnnnnnnnnnnnnnnnnnnnnnnnnnnnnnnnnnnnnnnnnnnnnnnnnnnnnnnnnnnnnnnnnnnnnnnnnnnnnnnnnnnnnnnnnnnnnnnnnnnnnnnnnnnnnnnnnnnnnnnnnnnnnnnnnnnnnnnnnnnnnnnnnnnnnnnnnnnnnnnnnnnnnnnnnnnnnnnnnnnnnnnnnnnnnnnnnnnnnnnnnnnnnnnnnnnnnnnnnnnnnnnnnnnnnnnnnnnnnnnnnnnnnnnnnnnnnnnnnnnnnnnnnnnnnnnnnnnnnnnnnnnnnnnnnnnnnnnnnnnnnnnnnnnnnnnnnnnnnnnnnnnnnnnnnnnnnnnnnnnnnnnnnnnnnnnnnnnnnnnnnnnnnnnnnnnnnnnnnnnnnnnnnnnnnnnnnnnnnnnnnnnnnnnnnnnnnnnnnnnnnnnnnnnnnnnnnnnnnnnnnnnnnnnnnnnnnnnnnnnnnnnnnnnnnnnnnnnnnnnnnnnnnnnnnnnnnnnnnnnnnnnnnnnnnnnnnnnnnnnnnnnnnnnnnnnnnnnnnnnnnnnnnnnnnnnnnnnnnnnnnnnnnnnnnnnnnnnnnnnnnnnnnnnnnnnnnnnnnnnnnnnnnnnnnnnnnnnnnnnnnnnnnnnnnnnnnnnnnnnnnnnnnnnnnnnnnnnnnnnnnnnnnnnnnnnnnnnnnnnnnnnnnnnnnnnnnnnnnnnnnnnnnnnnnnnnnnnnnnnnnnnnnnnnnnnnnnnnnnnnnnnnnnnnnnnnnnnnnnnnnnnnnnnnnnnnnnnnnnnnnnnnnnnnnnnnnnnnnnnnnnnnnnnnnnnnnnnnnnnnnnnnnnnnnnnnnnnnnnnnnnnnnnnnnnnnnnnnnnnnnnnnnnnnnnnnnnnnnnnnnnnnnnnnnnnnnnnnnnnnnnnnnnnnnnnnnnnnnnnnnnnnnnnnnnnnnnnnnnnnnnnnnnnnnnnnnnnnnnnnnnnnnnnnnnnnnnnnnnnnnnnnnnnnnnnnnnnnnnnnnnnnnnnnnnnnnnnnnnnnnnnnnnnnnnnnnnnnnnnnnnnnnnnnnnnnnnnnnnnnnnnnnnnnnnnnnnnnnnnnnnnnnnnnnnnnnnnnnnnnnnnnnnnnnnnnnnnnnnnnnnnnnnnnnnnnnnnnnnnnnnnnnnnnnnnnnnnnnnnnnnnnnnnnnnnnnnnnnnnnnnnnnnnnnnnnnnnnnnnnnnnnnnnnnnnnnnnnnnnnnnnnnnnnnnnnnnnnnnnnnnnnnnnnnnnnnnnnnnnnnnnnnnnnnnnnnnnnnnnnnnnnnnnnnnnnnnnnnnnnnnnnnnnnnnnnnnnnnnnnnnnnnnnnnnnnnnnnnnnnnnnnnnnnnnnnnnnnnnnnnnnnnnnnnnnnnnnnnnnnnnnnnnnnnnnnnnnnnnnnnnnnnnnnnnnnnnnnnnnnnnnnnnnnnnnnnnnnnnnnnnnnnnnnnnnnnnnnnnnnnnnnnnnnnnnnnnnnnnnnnnnnnnnnnnnnnnnnnnnnnnnnnnnnnnnnnnnnnnnnnnnnnnnnnnnnnnnnnnnnnnnnnnnnnnnnnnnnnnnnnnnnnnnnnnnnnnnnnnnnnnnnnnnnnnnnnnnnnnnnnnnnnnnnnnnnnnnnnnnnnnnnnnnnnnnnnnnnnnnnnnnnnnnnnnnnnnnnnnnnnnnnnnnnnnnnnnnnnnnnnnnnnnnnnnnnnnnnnnnnnnnnnnnnnnnnnnnnnnnnnnnnnnnnnnnnnnnnnnnnnnnnnnnnnnnnnnnnnnnnnnnnnnnnnnnnnnnnnnnnnnnnnnnnnnnnnnnnnnnnnnnnnnnnnnnnnnnnnnnnnnnnnnnnnnnnnnnnnnnnnnnnnnnnnnnnnnnnnnnnnnnnnnnnnnnnnnnnnnnnnnnnnnnnnnnnnnnnnnnnnnnnnnnnnnnnnnnnnnnnnnnnnnnnnnnnnnnnnnnnnnnnnnnnnnnnnnnnnnnnnnnnnnnnnnnnnnnnnnnnnnnnnnnnnnnnnnnnnnnnnnnnnnnnnnnnnnnnnnnnnnnnnnnnnnnnnnnnnnnnnnnnnnnnnnnnnnnnnnnnnnnnnnnnnnnnnnnnnnnnnnnnnnnnnnnnnnnnnnnnnnnnnnnnnnnnnnnnnnnnnnnnnnnnnnnnnnnnnnnnnnnnnnnnnnnnnnnnnnnnnnnnnnnnnnnnnnnnnnnnnnnnnnnnnnnnnnnnnnnnnnnnnnnnnnnnnnnnnnnnnnnnnnnnnnnnnnnnnnnnnnnnnnnnnnnnnnnnnnnnnnnnnnnnnnnnnnnnnnnnnnnnnnnnnnnnnnnnnnnnnnnnnnnnnnnnnnnnnnnnnnnnnnnnnnnnnnnnnnnnnnnnnnnnnnnnnnnnnnnnnnnnnnnnnnnnnnnnnnnnnnnnnnnnnnnnnnnnnnnnnnnnnnnnnnnnnnnnnnnnnnnnnnnnnnnnnnnnnnnnnnnnnnnnnnnnnnnnnnnnnnnnnnnnnnnnnnnnnnnnnnnnnnnnnnnnnnnnnnnnnnnnnnnnnnnnnnnnnnnnnnnnnnnnnnnnnnnnnnnnnnnnnnnnnnnnnnnnnnnnnnnnnnnnnnnnnnnnnnnnnnnnnnnnnnnnnnnnnnnnnnnnnnnnnnnnnnnnnnnnnnnnnnnnnnnnnnnnnnnnnnnnnnnnnnnnnnnnnnnnnnnnnnnnnnnnnnnnnnnnnnnnnnnnnnnnnnnnnnnnnnnnnnnnnnnnnnnnnnnnnnnnnnnnnnnnnnnnnnnnnnnnnnnnnnnnnnnnnnnnnnnnnnnnnnnnnnnnnnnnnnnnnnnnnnnnnnnnnnnnnnnnnnnnnnnnnnnnnnnnnnnnnnnnnnnnnnnnnnnnnnnnnnnnnnnnnnnnnnnnnnnnnnnnnnnnnnnnnnnnnnnnnnnnnnnnnnnnnnnnnnnnnnnnnnnnnnnnnnnnnnnnnnnnnnnnnnnnnnnnnnnnnnnnnnnnnnnnnnnnnnnnnnnnnnnnnnnnnnnnnnnnnnnnnnnnnnnnnnnnnnnnnnnnnnnnnnnnnnnnnnnnnnnnnnnnnnnnnnnnnnnnnnnnnnnnnnnnnnnnnnnnnnnnnnnnnnnnnnnnnnnnnnnnnnnnnnnnnnnnnnnnnnnnnnnnnnnnnnnnnnnnnnnnnnnnnnnnnnnnnnnnnnnnnnnnnnnnnnnnnnnnnnnnnnnnnnnnnnnnnnnnnnnnnnnnnnnnnnnnnnnnnnnnnnnnnnnnnnnnnnnnnnnnnnnnnnnnnnnnnnnnnnnnnnnnnnnnnnnnnnnnnnnnnnnnnnnnnnnnnnnnnnnnnnnnnnnnnnnnnnnnnnnnnnnnnnnnnnnnnnnnnnnnnnnnnnnnnnnnnnnnnnnnnnnnnnnnnnnnnnnnnnnnnnnnnnnnnnnnnnnnnnnnnnnnnnnnnnnnnnnnnnnnnnnnnnnnnnnnnnnnnnnnnnnnnnnnnnnnnnnnnnnnnnnnnnnnnnnnnnnnnnnnnnnnnnnnnnnnnnnnnnnnnnnnnnnnnnnnnnnnnnnnnnnnnnnnnnnnnnnnnnnnnnnnnnnnnnnnnnnnnnnnnnnnnnnnnnnnnnnnnnnnnnnnnnnnnnnnnnnnnnnnnnnnnnnnnnnnnnnnnnnnnnnnnnnnnnnnnnnnnnnnnnnnnnnnnnnnnnnnnnnnnnnnnnnnnnnnnnnnnnnnnnnnnnnnnnnnnnnnnnnnnnnnnnnnnnnnnnnnnnnnnnnnnnnnnnnnnnnnnnnnnnnnnnnnnnnnnnnnnnnnnnnnnnnnnnnnnnnnnnnnnnnnnnnnnnnnnnnnnnnnnnnnnnnnnnnnnnnnnnnnnnnnnnnnnnnnnnnnnnnnnnnnnnnnnnnnnnnnnnnnnnnnnnnnnnnnnnnnnnnnnnnnnnnnnnnnnnnnnnnnnnnnnnnnnnnnnnnnnnnnnnnnnnnnnnnnnnnnnnnnnnnnnnnnnnnnnnnnnnnnnnnnnnnnnnnnnnnnnnnnnnnnnnnnnnnnnnnnnnnnnnnnnnnnnnnnnnnnnnnnnnnnnnnnnnnnnnnnnnnnnnnnnnnnnnnnnnnnnnnnnnnnnnnnnnnnnnnnnnnnnnnnnnnnnnnnnnnnnnnnnnnnnnnnnnnnnnnnnnnnnnnnnnnnnnnnnnnnnnnnnnnnnnnnnnnnnnnnnnnnnnnnnnnnnnnnnnnnnnnnnnnnnnnnnnnnnnnnnnnnnnnnnnnnnnnnnnnnnnnnnnnnnnnnnnnnnnnnnnnnnnnnnnnnnnnnnnnnnnnnnnnnnnnnnnnnnnnnnnnnnnnnnnnnnnnnnnnnnnnnnnnnnnnnnnnnnnnnnnnnnnnnnnnnnnnnnnnnnnnnnnnnnnnnnnnnnnnnnnnnnnnnnnnnnnnnnnnnnnnnnnnnnnnnnnnnnnnnnnnnnnnnnnnnnnnnnnnnnnnnnnnnnnnnnnnnnnnnnnnnnnnnnnnnnnnnnnnnnnnnnnnnnnnnnnnnnnnnnnnnnnnnnnnnnnnnnnnnnnnnnnnnnnnnnnnnnnnnnnnnnnnnnnnnnnnnnnnnnnnnnnnnnnnnnnnnnnnnnnnnnnnnnnnnnnnnnnnnnnnnnnnnnnnnnnnnnnnnnnnnnnnnnnnnnnnnnnnnnnnnnnnnnnnnnnnnnnnnnnnnnnnnnnnnnnnnnnnnnnnnnnnnnnnnnnnnnnnnnnnnnnnnnnnnnnnnnnnnnnnnnnnnnnnnnnnnnnnnnnnnnnnnnnnnnnnnnnnnnnnnnnnnnnnnnnnnnnnnnnnnnnnnnnnnnnnnnnnnnnnnnnnnnnnnnnnnnnnnnnnnnnnnnnnnnnnnnnnnnnnnnnnnnnnnnnnnnnnnnnnnnnnnnnnnnnnnnnnnnnnnnnnnnnnnnnnnnnnnnnnnnnnnnnnnnnnnnnnnnnnnnnnnnnnnnnnnnnnnnnnnnnnnnnnnnnnnnnnnnnnnnnnnnnnnnnnnnnnnnnnnnnnnnnnnnnnnnnnnnnnnnnnnnnnnnnnnnnnnnnnnnnnnnnnnnnnnnnnnnnnnnnnnnnnnnnnnnnnnnnnnnnnnnnnnnnnnnnnnnnnnnnnnnnnnnnnnnnnnnnnnnnnnnnnnnnnnnnnnnnnnnnnnnnnnnnnnnnnnnnnnnnnnnnnnnnnnnnnnnnnnnnnnnnnnnnnnnnnnnnnnnnnnnnnnnnnnnnnnnnnnnnnnnnnnnnnnnnnnnnnnnnnnnnnnnnnnnnnnnnnnnnnnnnnnnnnnnnnnnnnnnnnnnnnnnnnnnnnnnnnnnnnnnnnnnnnnnnnnnnnnnnnnnnnnnnnnnnnnnnnnnnnnnnnnnnnnnnnnnnnnnnnnnnnnnnnnnnnnnnnnnnnnnnnnnnnnnnnnnnnnnnnnnnnnnnnnnnnnnnnnnnnnnnnnnnnnnnnnnnnnnnnnnnnnnnnnnnnnnnnnnnnnnnnnnnnnnnnnnnnnnnnnnnnnnnnnnnnnnnnnnnnnnnnnnnnnnnnnnnnnnnnnnnnnnnnnnnnnnnnnnnnnnnnnnnnnnnnnnnnnnnnnnnnnnnnnnnnnnnnnnnnnnnnnnnnnnnnnnnnnnnnnnnnnnnnnnnnnnnnnnnnnnnnnnnnnnnnnnnnnnnnnnnnnnnnnnnnnnnnnnnnnnnnnnnnnnnnnnnnnnnnnnnnnnnnnnnnnnnnnnnnnnnnnnnnnnnnnnnnnnnnnnnnnnnnnnnnnnnnnnnnnnnnnnnnnnnnnnnnnnnnnnnnnnnnnnnnnnnnnnnnnnnnnnnnnnnnnnnnnnnnnnnnnnnnnnnnnnnnnnnnnnnnnnnnnnnnnnnnnnnnnnnnnnnnnnnnnnnnnnnnnnnnnnnnnnnnnnnnnnnnnnnnnnnnnnnnnnnnnnnnnnnnnnnnnnnnnnnnnnnnnnnnnnnnnnnnnnnnnnnnnnnnnnnnnnnnnnnnnnnnnnnnnnnnnnnnnnnnnnnnnnnnnnnnnnnnnnnnnnnnnnnnnnnnnnnnnnnnnnnnnnnnnnnnnnnnnnnnnnnnnnnnnnnnnnnnnnnnnnnnnnnnnnnnnnnnnnnnnnnnnnnnnnnnnnnnnnnnnnnnnnnnnnnnnnnnnnnnnnnnnnnnnnnnnnnnnnnnnnnnnnnnnnnnnnnnnnnnnnnnnnnnnnnnnnnnnnnnnnnnnnnnnnnnnnnnnnnnnnnnnnnnnnnnnnnnnnnnnnnnnnnnnnnnnnnnnnnnnnnnnnnnnnnnnnnnnnnnnnnnnnnnnnnnnnnnnnnnnnnnnnnnnnnnnnnnnnnnnnnnnnnnnnnnnnnnnnnnnnnnnnnnnnnnnnnnnnnnnnnnnnnnnnnnnnnnnnnnnnnnnnnnnnnnnnnnnnnnnnnnnnnnnnnnnnnnnnnnnnnnnnnnnnnnnnnnnnnnnnnnnnnnnnnnnnnnnnnnnnnnnnnnnnnnnnnnnnnnnnnnnnnnnnnnnnnnnnnnnnnnnnnnnnnnnnnnnnnnnnnnnnnnnnnnnnnnnnnnnnnnnnnnnnnnnnnnnnnnnnnnnnnnnnnnnnnnnnnnnnnnnnnnnnnnnnnnnnnnnnnnnnnnnnnnnnnnnnnnnnnnnnnnnnnnnnnnnnnnnnnnnnnnnnnnnnnnnnnnnnnnnnnnnnnnnnnnnnnnnnnnnnnnnnnnnnnnnnnnnnnnnnnnnnnnnnnnnnnnnnnnnnnnnnnnnnnnnnnnnnnnnnnnnnnnnnnnnnnnnnnnnnnnnnnnnnnnnnnnnnnnnnnnnnnnnnnnnnnnnnnnnnnnnnnnnnnnnnnnnnnnnnnnnnnnnnnnnnnnnnnnnnnnnnnnnnnnnnnnnnnnnnnnnnnnnnnnnnnnnnnnnnnnnnnnnnnnnnnnnnnnnnnnnnnnnnnnnnnnnnnnnnnnnnnnnnnnnnnnnnnnnnnnnnnnnnnnnnnnnnnnnnnnnnnnnnnnnnnnnnnnnnnnnnnnnnnnnnnnnnnnnnnnnnnnnnnnnnnnnnnnnnnnnnnnnnnnnnnnnnnnnnnnnnnnnnnnnnnnnnnnnnnnnnnnnnnnnnnnnnnnnnnnnnnnnnnnnnnnnnnnnnnnnnnnnnnnnnnnnnnnnnnnnnnnnnnnnnnnnnnnnnnnnnnnnnnnnnnnnnnnnnnnnnnnnnnnnnnnnnnnnnnnnnnnnnnnnnnnnnnnnnnnnnnnnnnnnnnnnnnnnnnnnnnnnnnnnnnnnnnnnnnnnnnnnnnnnnnnnnnnnnnnnnnnnnnnnnnnnnnnnnnnnnnnnnnnnnnnnnnnnnnnnnnnnnnnnnnnnnnnnnnnnnnnnnnnnnnnnnnnnnnnnnnnnnnnnnnnnnnnnnnnnnnnnnnnnnnnnnnnnnnnnnnnnnnnnnnnnnnnnnnnnnnnnnnnnnnnnnnnnnnnnnnnnnnnnnnnnnnnnnnnnnnnnnnnnnnnnnnnnnnnnnnnnnnnnnnnnnnnnnnnnnnnnnnnnnnnnnnnnnnnnnnnnnnnnnnnnnnnnnnnnnnnnnnnnnnnnnnnnnnnnnnnnnnnnnnnnnnnnnnnnnnnnnnnnnnnnnnnnnnnnnnnnnnnnnnnnnnnnnnnnnnnnnnnnnnnnnnnnnnnnnnnnnnnnnnnnnnnnnnnnnnnnnnnnnnnnnnnnnnnnnnnnnnnnnnnnnnnnnnnnnnnnnnnnnnnnnnnnnnnnnnnnnnnnnnnnnnnnnnnnnnnnnnnnnnnnnnnnnnnnnnnnnnnnnnnnnnnnnnnnnnnnnnnnnnnnnnnnnnnnnnnnnnnnnnnnnnnnnnnnnnnnnnnnnnnnnnnnnnnnnnnnnnnnnnnnnnnnnnnnnnnnnnnnnnnnnnnnnnnnnnnnnnnnnnnnnnnnnnnnnnnnnnnnnnnnnnnnnnnnnnnnnnnnnnnnnnnnnnnnnnnnnnnnnnnnnnnnnnnnnnnnnnnnnnnnnnnnnnnnnnnnnnnnnnnnnnnnnnnnnnnnnnnnnnnnnnnnnnnnnnnnnnnnnnnnnnnnnnnnnnnnnnnnnnnnnnnnnnnnnnnnnnnnnnnnnnnnnnnnnnnnnnnnnnnnnnnnnnnnnnnnnnnnnnnnnnnnnnnnnnnnnnnnnnnnnnnnnnnnnnnnnnnnnnnnnnnnnnnnnnnnnnnnnnnnnnnnnnnnnnnnnnnnnnnnnnnnnnnnnnnnnnnnnnnnnnnnnnnnnnnnnnnnnnnnnnnnnnnnnnnnnnnnnnnnnnnnnnnnnnnnnnnnnnnnnnnnnnnnnnnnnnnnnnnnnnnnnnnnnnnnnnnnnnnnnnnnnnnnnnnnnnnnnnnnnnnnnnnnnnnnnnnnnnnnnnnnnnnnnnnnnnnnnnnnnnnnnnnnnnnnnnnnnnnnnnnnnnnnnnnnnnnnnnnnnnnnnnnnnnnnnnnnnnnnnnnnnnnnnnnnnnnnnnnnnnnnnnnnnnnnnnnnnnnnnnnnnnnnnnnnnnnnnnnnnnnnnnnnnnnnnnnnnnnnnnnnnnnnnnnnnnnnnnnnnnnnnnnnnnnnnnnnnnnnnnnnnnnnnnnnnnnnnnnnnnnnnnnnnnnnnnnnnnnnnnnnnnnnnnnnnnnnnnnnnnnnnnnnnnnnnnnnnnnnnnnnnnnnnnnnnnnnnnnnnnnnnnnnnnnnnnnnnnnnnnnnnnnnnnnnnnnnnnnnnnnnnnnnnnnnnnnnnnnnnnnnnnnnnnnnnnnnnnnnnnnnnnnnnnnnnnnnnnnnnnnnnnnnnnnnnnnnnnnnnnnnnnnnnnnnnnnnnnnnnnnnnnnnnnnnnnnnnnnnnnnnnnnnnnnnnnnnnnnnnnnnnnnnnnnnnnnnnnnnnnnnnnnnnnnnnnnnnnnnnnnnnnnnnnnnnnnnnnnnnnnnnnnnnnnnnnnnnnnnnnnnnnnnnnnnnnnnnnnnnnnnnnnnnnnnnnnnnnnnnnnnnnnnnnnnnnnnnnnnnnnnnnnnnnnnnnnnnnnnnnnnnnnnnnnnnnnnnnnnnnnnnnnnnnnnnnnnnnnnnnnnnnnnnnnnnnnnnnnnnnnnnnnnnnnnnnnnnnnnnnnnnnnnnnnnnnnnnnnnnnnnnnnnnnnnnnnnnnnnnnnnnnnnnnnnnnnnnnnnnnnnnnnnnnnnnnnnnnnnnnnnnnnnnnnnnnnnnnnnnnnnnnnnnnnnnnnnnnnnnnnnnnnnnnnnnnnnnnnnnnnnnnnnnnnnnnnnnnnnnnnnnnnnnnnnnnnnnnnnnnnnnnnnnnnnnnnnnnnnnnnnnnnnnnnnnnnnnnnnnnnnnnnnnnnnnnnnnnnnnnnnnnnnnnnnnnnnnnnnnnnnnnnnnnnnnnnnnnnnnnnnnnnnnnnnnnnnnnnnnnnnnnnnnnnnnnnnnnnnnnnnnnnnnnnnnnnnnnnnnnnnnnnnnnnnnnnnnnnnnnnnnnnnnnnnnnnnnnnnnnnnnnnnnnnnnnnnnnnnnnnnnnnnnnnnnnnnnnnnnnnnnnnnnnnnnnnnnnnnnnnnnnnnnnnnnnnnnnnnnnnnnnnnnnnnnnnnnnnnnnnnnnnnnnnnnnnnnnnnnnnnnnnnnnnnnnnnnnnnnnnnnnnnnnnnnnnnnnnnnnnnnnnnnnnnnnnnnnnnnnnnnnnnnnnnnnnnnnnnnnnnnnnnnnnnnnnnnnnnnnnnnnnnnnnnnnnnnnnnnnnnnnnnnnnnnnnnnnnnnnnnnnnnnnnnnnnnnnnnnnnnnnnnnnnnnnnnnnnnnnnnnnnnnnnnnnnnnnnnnnnnnnnnnnnnnnnnnnnnnnnnnnnnnnnnnnnnnnnnnnnnnnnnnnnnnnnnnnnnnnnnnnnnnnnnnnnnnnnnnnnnnnnnnnnnnnnnnnnnnnnnnnnnnnnnnnnnnnnnnnnnnnnnnnnnnnnnnnnnnnnnnnnnnnnnnnnnnnnnnnnnnnnnnnnnnnnnnnnnnnnnnnnnnnnnnnnnnnnnnnnnnnnnnnnnnnnnnnnnnnnnnnnnnnnnnnnnnnnnnnnnnnnnnnnnnnnnnnnnnnnnnnnnnnnnnnnnnnnnnnnnnnnnnnnnnnnnnnnnnnnnnnnnnnnnnnnnnnnnnnnnnnnnnnnnnnnnnnnnnnnnnnnnnnnnnnnnnnnnnnnnnnnnnnnnnnnnnnnnnnnnnnnnnnnnnnnnnnnnnnnnnnnnnnnnnnnnnnnnnnnnnnnnnnnnnnnnnnnnnnnnnnnnnnnnnnnnnnnnnnnnnnnnnnnnnnnnnnnnnnnnnnnnnnnnnnnnnnnnnnnnnnnnnnnnnnnnnnnnnnnnnnnnnnnnnnnnnnnnnnnnnnnnnnnnnnnnnnnnnnnnnnnnnnnnnnnnnnnnnnnnnnnnnnnnnnnnnnnnnnnnnnnnnnnnnnnnnnnnnnnnnnnnnnnnnnnnnnnnnnnnnnnnnnnnnnnnnnnnnnnnnnnnnnnnnnnnnnnnnnnnnnnnnnnnnnnnnnnnnnnnnnnnnnnnnnnnnnnnnnnnnnnnnnnnnnnnnnnnnnnnnnnnnnnnnnnnnnnnnnnnnnnnnnnnnnnnnnnnnnnnnnnnnnnnnnnnnnnnnnnnnnnnnnnnnnnnnnnnnnnnnnnnnnnnnnnnnnnnnnnnnnnnnnnnnnnnnnnnnnnnnnnnnnnnnnnnnnnnnnnnnnnnnnnnnnnnnnnnnnnnnnnnnnnnnnnnnnnnnnnnnnnnnnnnnnnnnnnnnnnnnnnnnnnnnnnnnnnnnnnnnnnnnnnnnnnnnnnnnnnnnnnnnnnnnnnnnnnnnnnnnnnnnnnnnnnnnnnnnnnnnnnnnnnnnnnnnnnnnnnnnnnnnnnnnnnnnnnnnnnnnnnnnnnnnnnnnnnnnnnnnnnnnnnnnnnnnnnnnnnnnnnnnnnnnnnnnnnnnnnnnnnnnnnnnnnnnnnnnnnnnnnnnnnnnnnnnnnnnnnnnnnnnnnnnnnnnnnnnnnnnnnnnnnnnnnnnnnnnnnnnnnnnnnnnnnnnnnnnnnnnnnnnnnnnnnnnnnnnnnnnnnnnnnnnnnnnnnnnnnnnnnnnnnnnnnnnnnnnnnnnnnnnnnnnnnnnnnnnnnnnnnnnnnnnnnnnnnnnnnnnnnnnnnnnnnnnnnnnnnnnnnnnnnnnnnnnnnnnnnnnnnnnnnnnnnnnnnnnnnnnnnnnnnnnnnnnnnnnnnnnnnnnnnnnnnnnnnnnnnnnnnnnnnnnnnnnnnnnnnnnnnnnnnnnnnnnnnnnnnnnnnnnnnnnnnnnnnnnnnnnnnnnnnnnnnnnnnnnnnnnnnnnnnnnnnnnnnnnnnnnnnnnnnnnnnnnnnnnnnnnnnnnnnnnnnnnnnnnnnnnnnnnnnnnnnnnnnnnnnnnnnnnnnnnnnnnnnnnnnnnnnnnnnnnnnnnnnnnnnnnnnnnnnnnnnnnnnnnnnnnnnnnnnnnnnnnnnnnnnnnnnnnnnnnnnnnnnnnnnnnnnnnnnnnnnnnnnnnnnnnnnnnnnnnnnnnnnnnnnnnnnnnnnnnnnnnnnnnnnnnnnnnnnnnnnnnnnnnnnnnnnnnnnnnnnnnnnnnnnnnnnnnnnnnnnnnnnnnnnnnnnnnnnnnnnnnnnnnnnnnnnnnnnnnnnnnnnnnnnnnnnnnnnnnnnnnnnnnnnnnnnnnnnnnnnnnnnnnnnnnnnnnnnnnnnnnnnnnnnnnnnnnnnnnnnnnnnnnnnnnnnnnnnnnnnnnnnnnnnnnnnnnnnnnnnnnnnnnnnnnnnnnnnnnnnnnnnnnnnnnnnnnnnnnnnnnnnnnnnnnnnnnnnnnnnnnnnnnnnnnnnnnnnnnnnnnnnnnnnnnnnnnnnnnnnnnnnnnnnnnnnnnnnnnnnnnnnnnnnnnnnnnnnnnnnnnnnnnnnnnnnnnnnnnnnnnnnnnnnnnnnnnnnnnnnnnnnnnnnnnnnnnnnnnnnnnnnnnnnnnnnnnnnnnnnnnnnnnnnnnnnnnnnnnnnnnnnnnnnnnnnnnnnnnnnnnnnnnnnnnnnnnnnnnnnnnnnnnnnnnnnnnnnnnnnnnnnnnnnnnnnnnnnnnnnnnnnnnnnnnnnnnnnnnnnnnnnnnnnnnnnnnnnnnnnnnnnnnnnnnnnnnnnnnnnnnnnnnnnnnnnnnnnnnnnnnnnnnnnnnnnnnnnnnnnnnnnnnnnnnnnnnnnnnnnnnnnnnnnnnnnnnnnnnnnnnnnnnnnnnnnnnnnnnnnnnnnnnnnnnnnnnnnnnnnnnnnnnnnnnnnnnnnnnnnnnnnnnnnnnnnnnnnnnnnnnnnnnnnnnnnnnnnnnnnnnnnnnnnnnnnnnnnnnnnnnnnnnnnnnnnnnnnnnnnnnnnnnnnnnnnnnnnnnnnnnnnnnnnnnnnnnnnnnnnnnnnnnnnnnnnnnnnnnnnnnnnnnnnnnnnnnnnnnnnnnnnnnnnnnnnnnnnnnnnnnnnnnnnnnnnnnnnnnnnnnnnnnnnnnnnnnnnnnnnnnnnnnnnnnnnnnnnnnnnnnnnnnnnnnnnnnnnnnnnnnnnnnnnnnnnnnnnnnnnnnnnnnnnnnnnnnnnnnnnnnnnnnnnnnnnnnnnnnnnnnnnnnnnnnnnnnnnnnnnnnnnnnnnnnnnnnnnnnnnnnnnnnnnnnnnnnnnnnnnnnnnnnnnnnnnnnnnnnnnnnnnnnnnnnnnnnnnnnnnnnnnnnnnnnnnnnnnnnnnnnnnnnnnnnnnnnnnnnnnnnnnnnnnnnnnnnnnnnnnnnnnnnnnnnnnnnnnnnnnnnnnnnnnnnnnnnnnnnnnnnnnnnnnnnnnnnnnnnnnnnnnnnnnnnnnnnnnnnnnnnnnnnnnnnnnnnnnnnnnnnnnnnnnnnnnnnnnnnnnnnnnnnnnnnnnnnnnnnnnnnnnnnnnnnnnnnnnnnnnnnnnnnnnnnnnnnnnnnnnnnnnnnnnnnnnnnnnnnnnnnnnnnnnnnnnnnnnnnnnnnnnnnnnnnnnnnnnnnnnnnnnnnnnnnnnnnnnnnnnnnnnnnnnnnnnnnnnnnnnnnnnnnnnnnnnnnnnnnnnnnnnnnnnnnnnnnnnnnnnnnnnnnnnnnnnnnnnnnnnnnnnnnnnnnnnnnnnnnnnnnnnnnnnnnnnnnnnnnnnnnnnnnnnnnnnnnnnnnnnnnnnnnnnnnnnnnnnnnnnnnnnnnnnnnnnnnnnnnnnnnnnnnnnnnnnnnnnnnnnnnnnnnnnnnnnnnnnnnnnnnnnnnnnnnnnnnnnnnnnnnnnnnnnnnnnnnnnnnnnnnnnnnnnnnnnnnnnnnnnnnnnnnnnnnnnnnnnnnnnnnnnnnnnnnnnnnnnnnnnnnnnnnnnnnnnnnnnnnnnnnnnnnnnnnnnnnnnnnnnnnnnnnnnnnnnnnnnnnnnnnnnnnnnnnnnnnnnnnnnnnnnnnnnnnnnnnnnnnnnnnnnnnnnnnnnnnnnnnnnnnnnnnnnnnnnnnnnnnnnnnnnnnnnnnnnnnnnnnnnnnnnnnnnnnnnnnnnnnnnnnnnnnnnnnnnnnnnnnnnnnnnnnnnnnnnnnnnnnnnnnnnnnnnnnnnnnnnnnnnnnnnnnnnnnnnnnnnnnnnnnnnnnnnnnnnnnnnnnnnnnnnnnnnnnnnnnnnnnnnnnnnnnnnnnnnnnnnnnnnnnnnnnnnnnnnnnnnnnnnnnnnnnnnnnnnnnnnnnnnnnnnnnnnnnnnnnnnnnnnnnnnnnnnnnnnnnnnnnnnnnnnnnnnnnnnnnnnnnnnnnnnnnnnnnnnnnnnnnnnnnnnnnnnnnnnnnnnnnnnnnnnnnnnnnnnnnnnnnnnnnnnnnnnnnnnnnnnnnnnnnnnnnnnnnnnnnnnnnnnnnnnnnnnnnnnnnnnnnnnnnnnnnnnnnnnnnnnnnnnnnnnnnnnnnnnnnnnnnnnnnnnnnnnnnnnnnnnnnnnnnnnnnnnnnnnnnnnnnnnnnnnnnnnnnnnnnnnnnnnnnnnnnnnnnnnnnnnnnnnnnnnnnnnnnnnnnnnnnnnnnnnnnnnnnnnnnnnnnnnnnnnnnnnnnnnnnnnnnnnnnnnnnnnnnnnnnnnnnnnnnnnnnnnnnnnnnnnnnnnnnnnnnnnnnnnnnnnnnnnnnnnnnnnnnnnnnnnnnnnnnnnnnnnnnnnnnnnnnnnnnnnnnnnnnnnnnnnnnnnnnnnnnnnnnnnnnnnnnnnnnnnnnnnnnnnnnnnnnnnnnnnnnnnnnnnnnnnnnnnnnnnnnnnnnnnnnnnnnnnnnnnnnnnnnnnnnnnnnnnnnnnnnnnnnnnnnnnnnnnnnnnnnnnnnnnnnnnnnnnnnnnnnnnnnnnnnnnnnnnnnnnnnnnnnnnnnnnnnnnnnnnnnnnnnnnnnnnnnnnnnnnnnnnnnnnnnnnnnnnnnnnnnnnnnnnnnnnnnnnnnnnnnnnnnnnnnnnnnnnnnnnnnnnnnnnnnnnnnnnnnnnnnnnnnnnnnnnnnnnnnnnnnnnnnnnnnnnnnnnnnnnnnnnnnnnnnnnnnnnnnnnnnnnnnnnnnnnnnnnnnnnnnnnnnnnnnnnnnnnnnnnnnnnnnnnnnnnnnnnnnnnnnnnnnnnnnnnnnnnnnnnnnnnnnnnnnnnnnnnnnnnnnnnnnnnnnnnnnnnnnnnnnnnnnnnnnnnnnnnnnnnnnnnnnnnnnnnnnnnnnnnnnnnnnnnnnnnnnnnnnnnnnnnnnnnnnnnnnnnnnnnnnnnnnnnnnnnnnnnnnnnnnnnnnnnnnnnnnnnnnnnnnnnnnnnnnnnnnnnnnnnnnnnnnnnnnnnnnnnnnnnnnnnnnnnnnnnnnnnnnnnnnnnnnnnnnnnnnnnnnnnnnnnnnnnnnnnnnnnnnnnnnnnnnnnnnnnnnnnnnnnnnnnnnnnnnnnnnnnnnnnnnnnnnnnnnnnnnnnnnnnnnnnnnnnnnnnnnnnnnnnnnnnnnnnnnnnnnnnnnnnnnnnnnnnnnnnnnnnnnnnnnnnnnnnnnnnnnnnnnnnnnnnnnnnnnnnnnnnnnnnnnnnnnnnnnnnnnnnnnnnnnnnnnnnnnnnnnnnnnnnnnnnnnnnnnnnnnnnnnnnnnnnnnnnnnnnnnnnnnnnnnnnnnnnnnnnnnnnnnnnnnnnnnnnnnnnnnnnnnnnnnnnnnnnnnnnnnnnnnnnnnnnnnnnnnnnnnnnnnnnnnnnnnnnnnnnnnnnnnnnnnnnnnnnnnnnnnnnnnnnnnnnnnnnnnnnnnnnnnnnnnnnnnnnnnnnnnnnnnnnnnnnnnnnnnnnnnnnnnnnnnnnnnnnnnnnnnnnnnnnnnnnnnnnnnnnnnnnnnnnnnnnnnnnnnnnnnnnnnnnnnnnnnnnnnnnnnnnnnnnnnnnnnnnnnnnnnnnnnnnnnnnnnnnnnnnnnnnnnnnnnnnnnnnnnnnnnnnnnnnnnnnnnnnnnnnnnnnnnnnnnnnnnnnnnnnnnnnnnnnnnnnnnnnnnnnnnnnnnnnnnnnnnnnnnnnnnnnnnnnnnnnnnnnnnnnnnnnnnnnnnnnnnnnnnnnnnnnnnnnnnnnnnnnnnnnnnnnnnnnnnnnnnnnnnnnnnnnnnnnnnnnnnnnnnnnnnnnnnnnnnnnnnnnnnnnnnnnnnnnnnnnnnnnnnnnnnnnnnnnnnnnnnnnnnnnnnnnnnnnnnnnnnnnnnnnnnnnnnnnnnnnnnnnnnnnnnnnnnnnnnnnnnnnnnnnnnnnnnnnnnnnnnnnnnnnnnnnnnnnnnnnnnnnnnnnnnnnnnnnnnnnnnnnnnnnnnnnnnnnnnnnnnnnnnnnnnnnnnnnnnnnnnnnnnnnnnnnnnnnnnnnnnnnnnnnnnnnnnnnnnnnnnnnnnnnnnnnnnnnnnnnnnnnnnnnnnnnnnnnnnnnnnnnnnnnnnnnnnnnnnnnnnnnnnnnnnnnnnnnnnnnnnnnnnnnnnnnnnnnnnnnnnnnnnnnnnnnnnnnnnnnnnnnnnnnnnnnnnnnnnnnnnnnnnnnnnnnnnnnnnnnnnnnnnnnnnnnnnnnnnnnnnnnnnnnnnnnnnnnnnnnnnnnnnnnnnnnnnnnnnnnnnnnnnnnnnnnnnnnnnnnnnnnnnnnnnnnnnnnnnnnnnnnnnnnnnnnnnnnnnnnnnnnnnnnnnnnnnnnnnnnnnnnnnnnnnnnnnnnnnnnnnnnnnnnnnnnnnnnnnnnnnnnnnnnnnnnnnnnnnnnnnnnnnnnnnnnnnnnnnnnnnnnnnnnnnnnnnnnnnnnnnnnnnnnnnnnnnnnnnnnnnnnnnnnnnnnnnnnnnnnnnnnnnnnnnnnnnnnnnnnnnnnnnnnnnnnnnnnnnnnnnnnnnnnnnnnnnnnnnnnnnnnnnnnnnnnnnnnnnnnnnnnnnnnnnnnnnnnnnnnnnnnnnnnnnnnnnnnnnnnnnnnnnnnnnnnnnnnnnnnnnnnnnnnnnnnnnnnnnnnnnnnnnnnnnnnnnnnnnnnnnnnnnnnnnnnnnnnnnnnnnnnnnnnnnnnnnnnnnnnnnnnnnnnnnnnnnnnnnnnnnnnnnnnnnnnnnnnnnnnnnnnnnnnnnnnnnnnnnnnnnnnnnnnnnnnnnnnnnnnnnnnnnnnnnnnnnnnnnnnnnnnnnnnnnnnnnnnnnnnnnnnnnnnnnnnnnnnnnnnnnnnnnnnnnnnnnnnnnnnnnnnnnnnnnnnnnnnnnnnnnnnnnnnnnnnnnnnnnnnnnnnnnnnnnnnnnnnnnnnnnnnnnnnnnnnnnnnnnnnnnnnnnnnnnnnnnnnnnnnnnnnnnnnnnnnnnnnnnnnnnnnnnnnnnnnnnnnnnnnnnnnnnnnnnnnnnnnnnnnnnnnnnnnnnnnnnnnnnnnnnnnnnnnnnnnnnnnnnnnnnnnnnnnnnnnnnnnnnnnnnnnnnnnnnnnnnnnnnnnnnnnnnnnnnnnnnnnnnnnnnnnnnnnnnnnnnnnnnnnnnnnnnnnnnnnnnnnnnnnnnnnnnnnnnnnnnnnnnnnnnnnnnnnnnnnnnnnnnnnnnnnnnnnnnnnnnnnnnnnnnnnnnnnnnnnnnnnnnnnnnnnnnnnnnnnnnnnnnnnnnnnnnnnnnnnnnnnnnnnnnnnnnnnnnnnnnnnnnnnnnnnnnnnnnnnnnnnnnnnnnnnnnnnnnnnnnnnnnnnnnnnnnnnnnnnnnnnnnnnnnnnnnnnnnnnnnnnnnnnnnnnnnnnnnnnnnnnnnnnnnnnnnnnnnnnnnnnnnnnnnnnnnnnnnnnnnnnnnnnnnnnnnnnnnnnnnnnnnnnnnnnnnnnnnnnnnnnnnnnnnnnnnnnnnnnnnnnnnnnnnnnnnnnnnnnnnnnnnnnnnnnnnnnnnnnnnnnnnnnnnnnnnnnnnnnnnnnnnnnnnnnnnnnnnnnnnnnnnnnnnnnnnnnnnnnnnnnnnnnnnnnnnnnnnnnnnnnnnnnnnnnnnnnnnnnnnnnnnnnnnnnnnnnnnnnnnnnnnnnnnnnnnnnnnnnnnnnnnnnnnnnnnnnnnnnnnnnnnnnnnnnnnnnnnnnnnnnnnnnnnnnnnnnnnnnnnnnnnnnnnnnnnnnnnnnnnnnnnnnnnnnnnnnnnnnnnnnnnnnnnnnnnnnnnnnnnnnnnnnnnnnnnnnnnnnnnnnnnnnnnnnnnnnnnnnnnnnnnnnnnnnnnnnnnnnnnnnnnnnnnnnnnnnnnnnnnnnnnnnnnnnnnnnnnnnnnnnnnnnnnnnnnnnnnnnnnnnnnnnnnnnnnnnnnnnnnnnnnnnnnnnnnnnnnnnnnnnnnnnnnnnnnnnnnnnnnnnnnnnnnnnnnnnnnnnnnnnnnnnnnnnnnnnnnnnnnnnnnnnnnnnnnnnnnnnnnnnnnnnnnnnnnnnnnnnnnnnnnnnnnnnnnnnnnnnnnnnnnnnnnnnnnnnnnnnnnnnnnnnnnnnnnnnnnnnnnnnnnnnnnnnnnnnnnnnnnnnnnnnnnnnnnnnnnnnnnnnnnnnnnnnnnnnnnnnnnnnnnnnnnnnnnnnnnnnnnnnnnnnnnnnnnnnnnnnnnnnnnnnnnnnnnnnnnnnnnnnnnnnnnnnnnnnnnnnnnnnnnnnnnnnnnnnnnnnnnnnnnnnnnnnnnnnnnnnnnnnnnnnnnnnnnnnnnnnnnnnnnnnnnnnnnnnnnnnnnnnnnnnnnnnnnnnnnnnnnnnnnnnnnnnnnnnnnnnnnnnnnnnnnnnnnnnnnnnnnnnnnnnnnnnnnnnnnnnnnnnnnnnnnnnnnnnnnnnnnnnnnnnnnnnnnnnnnnnnnnnnnnnnnnnnnnnnnnnnnnnnnnnnnnnnnnnnnnnnnnnnnnnnnnnnnnnnnnnnnnnnnnnnnnnnnnnnnnnnnnnnnnnnnnnnnnnnnnnnnnnnnnnnnnnnnnnnnnnnnnnnnnnnnnnnnnnnnnnnnnnnnnnnnnnnnnnnnnnnnnnnnnnnnnnnnnnnnnnnnnnnnnnnnnnnnnnnnnnnnnnnnnnnnnnnnnnnnnnnnnnnnnnnnnnnnnnnnnnnnnnnnnnnnnnnnnnnnnnnnnnnnnnnnnnnnnnnnnnnnnnnnnnnnnnnnnnnnnnnnnnnnnnnnnnnnnnnnnnnnnnnnnnnnnnnnnnnnnnnnnnnnnnnnnnnnnnnnnnnnnnnnnnnnnnnnnnnnnnnnnnnnnnnnnnnnnnnnnnnnnnnnnnnnnnnnnnnnnnnnnnnnnnnnnnnnnnnnnnnnnnnnnnnnnnnnnnnnnnnnnnnnnnnnnnnnnnnnnnnnnnnnnnnnnnnnnnnnnnnnnnnnnnnnnnnnnnnnnnnnnnnnnnnnnnnnnnnnnnnnnnnnnnnnnnnnnnnnnnnnnnnnnnnnnnnnnnnnnnnnnnnnnnnnnnnnnnnnnnnnnnnnnnnnnnnnnnnnnnnnnnnnnnnnnnnnnnnnnnnnnnnnnnnnnnnnnnnnnnnnnnnnnnnnnnnnnnnnnnnnnnnnnnnnnnnnnnnnnnnnnnnnnnnnnnnnnnnnnnnnnnnnnnnnnnnnnnnnnnnnnnnnnnnnnnnnnnnnnnnnnnnnnnnnnnnnnnnnnnnnnnnnnnnnnnnnnnnnnnnnnnnnnnnnnnnnnnnnnnnnnnnnnnnnnnnnnnnnnnnnnnnnnnnnnnnnnnnnnnnnnnnnnnnnnnnnnnnnnnnnnnnnnnnnnnnnnnnnnnnnnnnnnnnnnnnnnnnnnnnnnnnnnnnnnnnnnnnnnnnnnnnnnnnnnnnnnnnnnnnnnnnnnnnnnnnnnnnnnnnnnnnnnnnnnnnnnnnnnnnnnnnnnnnnnnnnnnnnnnnnnnnnnnnnnnnnnnnnnnnnnnnnnnnnnnnnnnnnnnnnnnnnnnnnnnnnnnnnnnnnnnnnnnnnnnnnnnnnnnnnnnnnnnnnnnnnnnnnnnnnnnnnnnnnnnnnnnnnnnnnnnnnnnnnnnnnnnnnnnnnnnnnnnnnnnnnnnnnnnnnnnnnnnnnnnnnnnnnnnnnnnnnnnnnnnnnnnnnnnnnnnnnnnnnnnnnnnnnnnnnnnnnnnnnnnnnnnnnnnnnnnnnnnnnnnnnnnnnnnnnnnnnnnnnnnnnnnnnnnnnnnnnnnnnnnnnnnnnnnnnnnnnnnnnnnnnnnnnnnnnnnnnnnnnnnnnnnnnnnnnnnnnnnnnnnnnnnnnnnnnnnnnnnnnnnnnnnnnnnnnnnnnnnnnnnnnnnnnnnnnnnnnnnnnnnnnnnnnnnnnnnnnnnnnnnnnnnnnnnnnnnnnnnnnnnnnnnnnnnnnnnnnnnnnnnnnnnnnnnnnnnnnnnnnnnnnnnnnnnnnnnnnnnnnnnnnnnnnnnnnnnnnnnnnnnnnnnnnnnnnnnnnnnnnnnnnnnnnnnnnnnnnnnnnnnnnnnnnnnnnnnnnnnnnnnnnnnnnnnnnnnnnnnnnnnnnnnnnnnnnnnnnnnnnnnnnnnnnnnnnnnnnnnnnnnnnnnnnnnnnnnnnnnnnnnnnnnnnnnnnnnnnnnnnnnnnnnnnnnnnnnnnnnnnnnnnnnnnnnnnnnnnnnnnnnnnnnnnnnnnnnnnnnnnnnnnnnnnnnnnnnnnnnnnnnnnnnnnnnnnnnnnnnnnnnnnnnnnnnnnnnnnnnnnnnnnnnnnnnnnnnnnnnnnnnnnnnnnnnnnnnnnnnnnnnnnnnnnnnnnnnnnnnnnnnnnnnnnnnnnnnnnnnnnnnnnnnnnnnnnnnnnnnnnnnnnnnnnnnnnnnnnnnnnnnnnnnnnnnnnnnnnnnnnnnnnnnnnnnnnnnnnnnnnnnnnnnnnnnnnnnnnnnnnnnnnnnnnnnnnnnnnnnnnnnnnnnnnnnnnnnnnnnnnnnnnnnnnnnnnnnnnnnnnnnnnnnnnnnnnnnnnnnnnnnnnnnnnnnnnnnnnnnnnnnnnnnnnnnnnnnnnnnnnnnnnnnnnnnnnnnnnnnnnnnnnnnnnnnnnnnnnnnnnnnnnnnnnnnnnnnnnnnnnnnnnnnnnnnnnnnnnnnnnnnnnnnnnnnnnnnnnnnnnnnnnnnnnnnnnnnnnnnnnnnnnnnnnnnnnnnnnnnnnnnnnnnnnnnnnnnnnnnnnnnnnnnnnnnnnnnnnnnnnnnnnnnnnnnnnnnnnnnnnnnnnnnnnnnnnnnnnnnnnnnnnnnnnnnnnnnnnnnnnnnnnnnnnnnnnnnnnnnnnnnnnnnnnnnnnnnnnnnnnnnnnnnnnnnnnnnnnnnnnnnnnnnnnnnnnnnnnnnnnnnnnnnnnnnnnnnnnnnnnnnnnnnnnnnnnnnnnnnnnnnnnnnnnnnnnnnnnnnnnnnnnnnnnnnnnnnnnnnnnnnnnnnnnnnnnnnnnnnnnnnnnnnnnnnnnnnnnnnnnnnnnnnnnnnnnnnnnnnnnnnnnnnnnnnnnnnnnnnnnnnnnnnnnnnnnnnnnnnnnnnnnnnnnnnnnnnnnnnnnnnnnnnnnnnnnnnnnnnnnnnnnnnnnnnnnnnnnnnnnnnnnnnnnnnnnnnnnnnnnnnnnnnnnnnnnnnnnnnnnnnnnnnnnnnnnnnnnnnnnnnnnnnnnnnnnnnnnnnnnnnnnnnnnnnnnnnnnnnnnnnnnnnnnnnnnnnnnnnnnnnnnnnnnnnnnnnnnnnnnnnnnnnnnnnnnnnnnnnnnnnnnnnnnnnnnnnnnnnnnnnnnnnnnnnnnnnnnnnnnnnnnnnnnnnnnnnnnnnnnnnnnnnnnnnnnnnnnnnnnnnnnnnnnnnnnnnnnnnnnnnnnnnnnnnnnnnnnnnnnnnnnnnnnnnnnnnnnnnnnnnnnnnnnnnnnnnnnnnnnnnnnnnnnnnnnnnnnnnnnnnnnnnnnnnnnnnnnnnnnnnnnnnnnnnnnnnnnnnnnnnnnnnnnnnnnnnnnnnnnnnnnnnnnnnnnnnnnnnnnnnnnnnnnnnnnnnnnnnnnnnnnnnnnnnnnnnnnnnnnnnnnnnnnnnnnnnnnnnnnnnnnnnnnnnnnnnnnnnnnnnnnnnnnnnnnnnnnnnnnnnnnnnnnnnnnnnnnnnnnnnnnnnnnnnnnnnnnnnnnnnnnnnnnnnnnnnnnnnnnnnnnnnnnnnnnnnnnnnnnnnnnnnnnnnnnnnnnnnnnnnnnnnnnnnnnnnnnnnnnnnnnnnnnnnnnnnnnnnnnnnnnnnnnnnnnnnnnnnnnnnnnnnnnnnnnnnnnnnnnnnnnnnnnnnnnnnnnnnnnnnnnnnnnnnnnnnnnnnnnnnnnnnnnnnnnnnnnnnnnnnnnnnnnnnnnnnnnnnnnnnnnnnnnnnnnnnnnnnnnnnnnnnnnnnnnnnnnnnnnnnnnnnnnnnnnnnnnnnnnnnnnnnnnnnnnnnnnnnnnnnnnnnnnnnnnnnnnnnnnnnnnnnnnnnnnnnnnnnnnnnnnnnnnnnnnnnnnnnnnnnnnnnnnnnnnnnnnnnnnnnnnnnnnnnnnnnnnnnnnnnnnnnnnnnnnnnnnnnnnnnnnnnnnnnnnnnnnnnnnnnnnnnnnnnnnnnnnnnnnnnnnnnnnnnnnnnnnnnnnnnnnnnnnnnnnnnnnnnnnnnnnnnnnnnnnnnnnnnnnnnnnnnnnnnnnnnnnnnnnnnnnnnnnnnnnnnnnnnnnnnnnnnnnnnnnnnnnnnnnnnnnnnnnnnnnnnnnnnnnnnnnnnnnnnnnnnnnnnnnnnnnnnnnnnnnnnnnnnnnnnnnnnnnnnnnnnnnnnnnnnnnnnnnnnnnnnnnnnnnnnnnnnnnnnnnnnnnnnnnnnnnnnnnnnnnnnnnnnnnnnnnnnnnnnnnnnnnnnnnnnnnnnnnnnnnnnnnnnnnnnnnnnnnnnnnnnnnnnnnnnnnnnnnnnnnnnnnnnnnnnnnnnnnnnnnnnnnnnnnnnnnnnnnnnnnnnnnnnnnnnnnnnnnnnnnnnnnnnnnnnnnnnnnnnnnnnnnnnnnnnnnnnnnnnnnnnnnnnnnnnnnnnnnnnnnnnnnnnnnnnnnnnnnnnnnnnnnnnnnnnnnnnnnnnnnnnnnnnnnnnnnnnnnnnnnnnnnnnnnnnnnnnnnnnnnnnnnnnnnnnnnnnnnnnnnnnnnnnnnnnnnnnnnnnnnnnnnnnnnnnnnnnnnnnnnnnnnnnnnnnnnnnnnnnnnnnnnnnnnnnnnnnnnnnnnnnnnnnnnnnnnnnnnnnnnnnnnnnnnnnnnnnnnnnnnnnnnnnnnnnnnnnnnnnnnnnnnnnnnnnnnnnnnnnnnnnnnnnnnnnnnnnnnnnnnnnnnnnnnnnnnnnnnnnnnnnnnnnnnnnnnnnnnnnnnnnnnnnnnnnnnnnnnnnnnnnnnnnnnnnnnnnnnnnnnnnnnnnnnnnnnnnnnnnnnnnnnnnnnnnnnnnnnnnnnnnnnnnnnnnnnnnnnnnnnnnnnnnnnnnnnnnnnnnnnnnnnnnnnnnnnnnnnnnnnnnnnnnnnnnnnnnnnnnnnnnnnnnnnnnnnnnnnnnnnnnnnnnnnnnnnnnnnnnnnnnnnnnnnnnnnnnnnnnnnnnnnnnnnnnnnnnnnnnnnnnnnnnnnnnnnnnnnnnnnnnnnnnnnnnnnnnnnnnnnnnnnnnnnnnnnnnnnnnnnnnnnnnnnnnnnnnnnnnnnnnnnnnnnnnnnnnnnnnnnnnnnnnnnnnnnnnnnnnnnnnnnnnnnnnnnnnnnnnnnnnnnnnnnnnnnnnnnnnnnnnnnnnnnnnnnnnnnnnnnnnnnnnnnnnnnnnnnnnnnnnnnnnnnnnnnnnnnnnnnnnnnnnnnnnnnnnnnnnnnnnnnnnnnnnnnnnnnnnnnnnnnnnnnnnnnnnnnnnnnnnnnnnnnnnnnnnnnnnnnnnnnnnnnnnnnnnnnnnnnnnnnnnnnnnnnnnnnnnnnnnnnnnnnnnnnnnnnnnnnnnnnnnnnnnnnnnnnnnnnnnnnnnnnnnnnnnnnnnnnnnnnnnnnnnnnnnnnnnnnnnnnnnnnnnnnnnnnnnnnnnnnnnnnnnnnnnnnnnnnnnnnnnnnnnnnnnnnnnnnnnnnnnnnnnnnnnnnnnnnnnnnnnnnnnnnnnnnnnnnnnnnnnnnnnnnnnnnnnnnnnnnnnnnnnnnnnnnnnnnnnnnnnnnnnnnnnnnnnnnnnnnnnnnnnnnnnnnnnnnnnnnnnnnnnnnnnnnnnnnnnnnnnnnnnnnnnnnnnnnnnnnnnnnnnnnnnnnnnnnnnnnnnnnnnnnnnnnnnnnnnnnnnnnnnnnnnnnnnnnnnnnnnnnnnnnnnnnnnnnnnnnnnnnnnnnnnnnnnnnnnnnnnnnnnnnnnnnnnnnnnnnnnnnnnnnnnnnnnnnnnnnnnnnnnnnnnnnnnnnnnnnnnnnnnnnnnnnnnnnnnnnnnnnnnnnnnnnnnnnnnnnnnnnnnnnnnnnnnnnnnnnnnnnnnnnnnnnnnnnnnnnnnnnnnnnnnnnnnnnnnnnnnnnnnnnnnnnnnnnnnnnnnnnnnnnnnnnnnnnnnnnnnnnnnnnnnnnnnnnnnnnnnnnnnnnnnnnnnnnnnnnnnnnnnnnnnnnnnnnnnnnnnnnnnnnnnnnnnnnnnnnnnnnnnnnnnnnnnnnnnnnnnnnnnntttcttaggagaagcagctattagttctctaatatactactacgtatactactgtctctatttcctgatcctccattatatacagcattcccttaggcattctatacctaggggtcttacagtgatcctatacgggctctggcctattacagtactaagtcctttatatacttagattttgtcacggataactttgtgcgctactatatatattggtcctgggcatgtcagagcgagagctctgacataatggtcttttggctgagcggaagaatgtgcgcccaggcatatcctttacagatttaaacccttatatatactcttaattatatataataactaatagactattaatctattaataaaggaaggagtattaatatatataaagctttactatatagatattaatagatattagttaaaataagaagttaatattagataggttaatatagattagattctaactaatagaaatacctactaatagtctaataaaagctttaccctattagaaataagaatagtttagggaattacttagaatatctaagattaattatctaattagttataannnnnnnnnnnnnnnnnnnnnnnnnnnnnnnnnnnnnnnnnnnnnnnnnnnnnnnnnnnnnnnnnnnnnnnnnnnnnnnnnnnnnnnnnnnnnnnnnnnnnnnnnnnnnnnnnnnnnnnnnnnnnnnnnnnnnnnnnnnnnnnnnnnnnnnnnnnnnnnnnnnnnnnnnnnnnnnnnnnnnnnnnnnnnnnnnnnnnnnnnnnnnnnnnnnnnnnnnnnnnnnnnnnnnnnnnnnnnnnnnnnnnnnnnnnnnnnnnnnnnnnnnnnnnnnnnnnnnnnnnnnnnnnnnnnnnnnnnnnnnnnnnnnnnnnnnnnnnnnnnnnnnnnnnnnnnnnnnnnnnnnnnnnnnnnnnnnnnnnnnnnnnnnnnnnnnnnnnnnnnnnnnnnnnnnnnnnnnnnnnnnnnnnnnnnnnnnnnnnnnnnnnnnnnnnnnnnaaatagatatataataatatagatattccttcctaagcctatataggcttatatatattttcctcttatatagaccattatctgttatatactagtaatatattatttagtaataataaagactagaaaagtttagaaggatatatttataaactttatagtaatctaattaattaaaaagtatttaaataaaagatagttactactttaactactaaaactaagcttctagtacttactaaagctagaaaaatagtctaatagtaatactaagtcctttatatacttagatttaaacccttatatatactcttaattatatataataactaatagactattaatttattaataaaggaaagagtattaatatatataaagctttactatatagatattaatagatactagttaaaataagaagttaatattagataggttaatatagattagattctaattatagaaatacctactaatagtctaataaaagctttaccttactaaaaataagaatagtttaaggaattacttagaatatctaagattagttatctaattagttataaaagtagatattaaagaaaattttattaattaaagatagctcttaaagctctaaattataattactttaaaagctagggggtatattagaatctaggataaatactattattttttatccttaatatagttaggttatataactaactaggctagttttctatagaaaaactaacttagatggttttctgcctaaaaaaccagtcctacagtttttcgcccaaaaaacatcctttcattttattttatttatttgattactaagatatctattagattatcatattttagtacaactaccatttgtgccggcgccgccggattcggccgccccctcgatcgggtttggcgtccgtcccgtttgggtttggtctatcccaattcggcttggcgtctacgcttttcccaaattggcagaagcacagcccgctcctgttctggttaagtagctccagaagtagtttggcgcccgggctatccctaaactggtatctgccattcccgaccgcctaccagccttatccttgaactatataacttccagtgcgtcgcttgatcatcctcctctctctgactgactacaccatttcctcccccgtcattcctagccgtgaaatgataccgtaattccggatcgtacggtattcttccccctgtgcctccctgtttcagctgggttcctcgttatcgcctgtgcccctttctccactcgactcgctatagatagatctatctattggccctagtcgccctaatccttaaattagaccgctgcactgcaaccctataatttgaatttagacgacatcttatatacttaccctttagtccctgtttcttcgttgtatccgctataacggtatagccttttataatcggcctagggagagagccttaacttgcgaagagattcgatttatgacctagccggttgagcacaattgtgacgcggcgctctctgagctagtgctaatcacaatatctcgctatacctatgtatctattggcacttactactcttacgccccacctataacgaagaatatctcagtcctagattcttttttgtaaaggcttcgacttttggtagccgtgaataggctaacgtcactgagtggataacctagacgccagtatctacgccgagtaatcttctgtagacgaccttagcacaatttacttttctagcgaggcgtagtaaagaagactgaggaatctagactatcggaggttcctaggatggtcggtatcactgtacgcatgataatatcttacccgactggacgctgatacctatactaaacaccctttcggagacgattccttcactataatcctcttctagtaaggtgtaatagggtagactgtaaacttatctaagtataaaacactttaatctaataggagaaatgctatatacagtgtcggccttacgtatgactccttgtgaattccgttatagataggttggtggatcctcgtattagcaggctgcgctttatcttacgactcttctccattcgacctgcctaaagcgctcggaagaggtaagggaaagtaggtaggtataaagggttgttagaaatccttactaggaccgagaaggaggttgactatctatttataattctttctcttctattctgatatattgcgtctatatctttcttatagtatagtaccgatcaatctagacaatatgatctattatcgtctgcctactaaaaaaccatattttaacctattctaggcactcggttcctacgattgtatccatttacagatacctttagatagacctacgccggcctatctatttctatctagctagtacaggtattcgagtcttctattcttagggtatacgctataccttcaaagtcatttctatatacctagtgaagtcgagataatattagcccctaataagtttacagaagaagtaactattaatagctcgaatgagtttaatatggatttcttaagtacctccttaggaagagatacaaacgttgctatatcaaatatatatatagcaagtcgagaattgctaaatgatatttctagtagtgatttagggtaaggttctaattagtattataatggtacgtggtggctattattttgactccccttagtttcttcaattcactctattaaacttattataccctatctctctttccttactaataaagtagtcgataattgagggcttacttaatactttaagaccagacttctaaggtaataagcattataagagcaatatgatatcttcttcctaagatattatctaggggggaggtcttaagcaatctatacctttatactctatatcggtcggtaatagcctctgtatcctagtagcagaggaagaatttctaagttaaacgaaaatatataaaaatacaggtcagtggtctctcagttagctaggttacccagtcctctagcttacgtagtagaatatagacgaagctataatagagggagacattttactacattcgaacctgataatagatatagtagacagtaataaaatagttaatagctaagttcttgaccctacgggctaggaaaagtaatctactctaacagatttattacctagagatactagaattaaagtagacgaattaggatcgaaaccggcagcttatgtcattgggaaaagcatgccagccaagaagtataacagatatcctatttccgaaagctatatggttattagccaagagaaagacagggctgcagtttataataacaaaggcgagctacagcgttgtgatacagagagcctgttagtatctccaaaatttcgttaaaatggaacattagcgcgttcaatcttacctatattctaagacagtaaaaagcagtcgctatatagcctaacagaggaagttataggattttatccagtattagattaggctccagttttagaccagctttcggttattatccctaactgccgttcctaagagcgaggaacgaataactctatcttaataatacgaatagcctctttaaacaggaagcgggactaggataagtatatatctgataacagtagcaatgacccttatggccccgacgatacagactatgtaggcgaaagtggtaaagacatatatagaaatagcattcctttctatcgactaaaaagagtaaggcgacctaccgtacagcttaagcctagacctccccggcagaacactaaacgtctcttagtcgacgaggcagttcaatttaaagtagccgtagatcagtcttccccaataagcttatataatatcgaaacgattcctatccgaggtttccttacgcgatagatacttttattaagggtcatctattcagttacctttaaagagtaggtagagtattcctactcttagagatcaggtagagctacttcacactataaaaacaaaattggcagccagcattctaagcaaccccctcagaaagggtcctgcgctaggaaaacgaccgggccaacccgattcctatctaaggacgaccaacttttgattgaattgaaggaagagcagagcctgccatagaagcgaatcgcacagtattttcctagaaggtcggtaggctccctctaggtacactattccacacgacttaagggccataaggctagaaattctaggtattctgggcagagttctaacgtaaggagcgaatctttatatagaggcgcaccttgcgaggtagtttaagccgcgggtagcaagagtaaaggcaccgaagaaggtatgttaagaccgcgatacggtctacctcggcgcaggcaaacggtagaccgctattccccggtttgagttggcagtagttattagactttatcgaatatcagtcaaacggatcgccaaaaataagaccgtcccgctgggtctagcgcccgtagtgcattgggcaacagttgaatcttaccaggtttcacagtttcgaagagcggcaatggtctctccgcagagtcgctaagccgctctggcaatgaaacgcagttttaatctcactttttgctattggcgacactgctttcgactgtaatgtgagtcttacaaacggcggacctgtgaattactagatccggttagttttgccttttagggtttagagccccaatacgctgtcacgtaacctaccttcaacgccgctgacttaaaagaaaaggtggcgccgtttcccgacatcccacatatagacgggttgttccagctgctgcccaactttgcagaccgccgtcggactcagcgtcggatgtgttagtgctctgtcactccagagagagattttgtaattcaccgccatccaggaattgacggccttcccttggttacttttggccttgggctgtagttacctacgaatgacaggcttgagcaatatttctccaaaattgaccaatagatattagcgtctttaagttcaagccggaacaaggcaccccgtgaggtgtgataataacggcaccttagcgaatcaattaggtatgaagcggtgttgaagcgaagggagtgaaacccgcgagggtcctccactatgagttcttgcagaaagggagtggaccagatgtgtagactagacttgtgacattcaaactagatttctggcgtgaatacaaaggtattgccccatgtagcaaattggggttggtgagcagatttgtctagagagcccatcatgcaatcactcagcccaagaacctccaaggtttcttttacggactaaattcaacgctcggagtctgagtatggacctcggcgcaagtttatttcccatcggggcattgcaagaaaccgcccggcactgcaccctcatgggtcatcaagccacagtagtaggccaatgggtgaccatcaacaccttgcgccttgccattgtagtaaaatacgacgcgctcgtccccgtatttcttattgttcttgccaccgttgtaaggcccgttcttgacgagcggatactcctttcgattctggtcgtgctcggggcagtgagcagggaagtgcagctgcacattcttgctgttatcattatcgaacgggtgcgggtagttcttcgcgcctcgcgtctcaggagggtccagcatgcccaggttcacggcgtgctgcgtggcaaggtagatatcgtgtccgtcataagtgttcttgccgcacttgatggatgcagaggcgttgggaccatcccactaaaagagatatcagtcagaattggaaggtttcaatttaatggagtgatgacgtacgttaatgggtgcgttggaaggttccccacgctcttgaagatcagcaaagtcatcggccgaaagggccgaggcgaggctcaagaagaggatggaggcggttgccaatgtgaacttcattgttgcggttggacgattggagtagaaaaagattgctggaggattgaagttgaactgttgatgctaagatgaggtctgagtgcttgctgctggattttagagccggcaaaggctcttttatgccattgatggagtcacctaggcttcacctaggctgattgagagccttgcactagcagggacggacatacagaatctacctgttgaagcgtcgattggctcacagaggagctgatatcgcgcgacaattgggggcaattctacattgtgatgcaatgatttccttgtttggaggctttttagtaggactgttagtagtggaatccttcaaaccggtaaagttcgctttgcatacatgcgactagggcgagtgctccaaagcaagcttgaagcggaagacaatgactttgcctactctcactgtgacaagaaagtctccatttccctcgcaactgcgtatagaatagagcaattggagtgttgaagttccaatgctgatggagcttatcggtgtaagctactctaaagccctgtaaatcgtactgcatatagcatttgaccactctcgtctttcggaccctgcgcatggacatcgttcatttgtacacaaggctgggaggattctattgggggccgtcagccttgagaccaaaactggccccatcttccctagtggatataatgtccagtgacgtcaatccgcatgtccatccgcctgttgaactggtcgggtctcggcgtgacagatgctccgacagaatcatatcgtctttgcataccaggcttctcatcttttaggtaatatcgtctcgactcaagacgctattgatgcggttgactggatcaagctgcttggcggcgccaaagtctcttccctgaattgagcacgattttatgttgcgccttttcggccaagaaaaacagttgttccactcgacgaaatcagttgttgttgtatcgggcattttgctctaatcggtgcggcttaattgtcaaccccacgttcctggttgatcggcagattagtcatgatgggcagccttatgatgtcactgtacagggctattgttgcaacaggacggaggattacactgcgcctcgatcaatatcagggtagttgtgtgactctttggacttttgctgcctagttgccactcttgaaagtttccgatattgcgaccactccgcactttctttcctcgaacataacgcaactaacacatccttcgtctcagcagcgcagcgtagtgactgctcatctctcaaacactcaaagtcccaaaatttattccttcaagagccctcgcgctctgtcatcatgaacaccagcattcaagaaatgacgtgcaaatcgattgagctcgacggctttggctctgccgccgatgacgcttggttcgatcaacatactgcacccatggacggcgaggaagagaccggggtgcatccgtatcaagctgcggctctcaaagcgtacctcaaaggcgactccaagccatccgagacagctgccgccctgaccaagccacatgactccgagaagaagaccgacctgcgagaccgcatagtgggcatactcgaagacgcactttttgagctgcctgaaagccacacacccgctcttgtcgacctgctcaaagaacttagccaactgccagacgaagaggacggcgaacctgtctggaaaggtctcaaaagtttcggccactcatgggcagatggatggaagcagagccactggcgcaaagcgttggcaacgcgggatccagccacaagagcgaagaggcgtgaggctcacgtgcaccaggcctttgtggaggcgtcttgtgcaatggctgctccgggaccgaatgctgaagatggtcttttgccactaagctggggctatgagtgcatctccgaagcgctcgaatgccaagatgcattgtgggactttgaggtacctgctgcggcagtgtggatcaaggtagctggagaaagactcagagagagcgcgaagaaaggtgagaagtcctgggcgttggagagagaggggaggctttggacggcggggccgatgagcatggatcggtggaaattctggttgcaaagactcgaggagattgagaagattggcaaggtcatctcgtcaacggcgagtgaaggtctgcgggatgctcgagcccagtctaaggagtagttgatgactatgcctaaacacttagcgttagagtagcagtctggattgttaatttgcttccagacggccttgatggcaaattgaacatgtgctaggcttgtgccctgagagtcgttgataaagtcggattccagctaacaggctagaagaccgattataagatcacacattgcccaccccatgactcccaagccattagccccttataaatcgaagatccgatcgaagttctctgcctaaacaatgttgaatgtcagaatagttcggcaagggtcatgcgatcgactgacatacgatatccaatctccggggccagatttgctatcggcgcggtacagatccggatcctgatgatagcagatcagaaggcgtataaggggactcgtaggggtttggaatcatccccgacgcacaacatcgatagtttggtcggccatgtccaaaggcacgctcgcagctgacagcggggaagcgtcaaggaggcttgaatggtgggaacataacgagatataaagacaggtacagacttccttggttggtgggtgatgccaaaatcacgggatggattcccgtcatccgcgtttgattctaggtttgggggaggggaacagagtttatctgtcctctctatcgcccacgaaagacgcttgatcaaatttggcagcttgctgggtggcatggacgacattttgtagtcgatttctgttataattttagcattattctcctgtgcatgacatggcgttgtttataacttacctttgcttcttcgttccatcatctgttgatcatcacactctgtggcatgacttttttcttccgttggtaaactttgttctgtacgtatccgtttgcgtcgcgccatattctcttgttcttccacgctgattgattgatctataattttgacaagttcttggaactgttcgcaaggttttaagggttcggccgacacttcagagtagagcggtgaaagtcgatgatcaaagcacgcccaagctcttcactccaatggacattgtctcgcctaaggtcttcatgtattatcctgagggctttgatttccttgttcaaatttgtgaatttaacgctgtaccccctccccccagatatcacgagtgatctgaaggtgtagacgtaacgttaactaacgcagtggtctatgggtctcggggccgtcataagcagacagcagtggagctagacaggagcttttttctgctcttccccaccccgacgcgatgaccatgccgcatgttgccagaggtgggttcaagagcccgagggcgctttaaccatttcacttcctccaggtcaatgacaaacaaacgaatacccaggtcatcccacagcatgttgcgccactcactgtcgccatggacaactccatgtgaccggagcacggtcagagctttgtcgcgctctaggtgaaagaatctggaattctcatcgttgataacatgctgaagacgttttccagcccagctcagtatcatcatctacgccattaattcgccatggtaccaatatgagactcgtggcgtgaaagtcccaagacagacggggatctgatttccttgcaggctcctgaggtgacgataattgtttgcctctgctttaatgagatgctgcttgtccgccgtggtagccttgattatcacagtgtatccgtgcgatagaagagtcgctttgataaggtaacccgtccgaccacagacgtgaagttgctcaaacccgtgatttcggtttcgggaaagttgatggtgaagccggcgtgtgaactcctgcggtcccacggagtgtctttggccaccgtggagtttccagttggggcattctttatccagaggatctcggttggccataccgcggatgcaggcaatagtgcaatatggtcgcgcggattgccctactttttgagaagtctgtttattgttccggccggcttgtgtcctttcgctttccttagtcgattgacgattgttacctcgactgcggctcgacctgctgcgcgccgctgctgcgatggatggcgaatgcgattcttcatcactgccgctgccttcggtcgacgaatgcttcggagtagacatgcctggttggcagcgagaacgggatcgtgtattgtgtgtcttcggctctggtttccagtgcgagggtcaataattggaggctcgcgggtctttacgaagcgtttcgggaatttttctcaaaacgtcctggtattcgacctcccaggtctttagtctatcgtgtgccgcatcatgccattcttgagatagatcttcggcggccagcgcttgaagggtaaatgcaagcacctgaccgatggcggtccggtagaggcgccaatcatcgtccgcctgcacgtcctgattcgggatacacaagaaatattgaacaactgtggggtcatcattcggaatatagagaaaaacaaaagcctcccccgtgcagatgtagccgtattgaaccccactgtcgatcatatataagaatatctgagtaaccactgcggcaacgaggtaggtggcataaaactcaaacgtatcgccttcctggtcaatgacatcgcgagccagatccatttggtgtagacccgccaccaattcagggattgtcaccttatacggcgctttgaactccactgcatacaccggtttttatcgttcatcagccacaaggtacacgcagaactggtcggcgcgccgattgcgtcttcgtgtagtgccatccctcttctatccctgcgccactcctctccccattcctctgcctcttccatgcctagtgttcgccactcgttggggtgtccgcgtgccctgaaggttcatttgctccaggctcttctccaaagaggtttccgatgggtttgcgcggtcgtagaaggtaactcggccttggattccaaactcatatcgaaggggttcatcatctcgcaaagccataatggcctgtggcataaaactcaaacgtatcgccttcctggtcaatgacatcgcgagccagatccatttggtgtagacccgccaccaattcagggattgtcaccttatacggcgctttgaactccactgcatacaccggtttttatcgttcatcagccacaaggtacacgcagaactggtcggcgcgccgattgcgtcttcgtgtagtgccatccctcttctatccctgcgccactcctctccccattcctctgcctcttccatgcctagtgttcgccactcgttggggtgtccgcgtgccctgaaggttcatttgctccaggctcttctccaaagaggtttccgatgggtttgcgcggtcgtagaaggtaactcggccttggattccaaactcatatcgaaggggttcatcatctcgcaaagccttaatggccttttcgacaaagttatccaccgtgtctcgctcaaaattccgaagagacgcttccgaatagatcggcctgttctggacattcgtaaggacataatcaatttgggtatcagaagggaatagtgggcgcgaggtaaaggcaccggtgcggtcgaatttcctccagattttctcttggagttgggggaaatcaagccaagggacaacgcgcttggggtaaagtcggttgacggggtcagtcgcgtcgccctgggtcgtgagagtcgcatccgtctcaacccgaatcgcttgagacagagagttgtggcagcgatcgaggaggcggaatagtgtgttgggttcgagtcgccgttcagcctctccctggaggcgctctgcttcttctcgcgcctgtctctcttcctcttcacggcgctgtgcctcttctcgtgcctgtctctcctcctcaagctgacgtcgtagttcagcgattgtttcttccatcgcttgttgaaatcagtattcagcagataatcgaatgatgcaaatcgaagtctacatagtagggggttcgctgtctggcgcgggggagtggcccgtcagggcggaatgcgtccagatgttttaccagcttactcacccccttggctcgagtcgattcatgcctcaggcacaaaataccttagccttttgatatgctgacgttcaaagtcctttgttttctagaatatacgtcgattcggtggtctcggattacctagactggcctcgccagtaaatttataaatatagttctacttaaattcctcagcaagtacagtcaccgtggcgaggtcattatcttgactacatcactcgcgagaccccgttttccgttctttcctgttgcgaaggatatattgtgtgatctcgctgtgggtaaggcattcgacaaagctaataagcagcgaaaactcttctgatataaatggaataggtttacctctctcaatctccgtctgttctgcggaacacccttctgtatgctcttagttttgggattagacgtcacgcagtcaatcgccatatggacctcatcgaaagcaaagagacgtacctttcctgtctgggcacttgaatctctcgtcaggaataggctgtatgggcgagacaaactgagctgcctttactgacaaaacctgtaacggtcagttgctaaataatgctgggagagctgacgtctgacgaggtatttatatagattttgattgagtttccaggtttgggtgggcgttgatggcaaatctgatgggcacgatcaagcttcccagcagaaaaaggaatgtaaagtcgatggcatgattcttcggatcaaaaaatgactttgttcaccatcaattgaaccttgttggaacaccctcaggttaaagcagccgcactatatgtctcattttcaatacccttgcgtaagtgccgcagagttctgctctcacgataagctgatataaacagataagaaagtaaaatcaaaactggccgctactgggttgtccaagcttgaaaatttgtcgttttcattcttacccccccaaaaaacatcattctttcaagcatgattcgattgcgcatcttgcaagtcagaaaacaaatgtcgcatattgcaatattgtttaggcaaccgtttcaatttttttttaggtaatttatgttgagaagacggtctctatctatgcttgcaaatgacaagacactgcttctaagagtagtaaataccgtgcgtataatgcataacagatgtttgaaaagtaccccacaagtatacaggagtgtgtatgtgtgtatgtgtgtgtaattcatttaccctgacccctcgcaataaagcgatatgtaggctaccactactttttgtaaatatatgataatttatccactgagattgttctaaacttcctgaacgataaactttaagccttacctagtaaggcctatgattgtctccactttaaactatgaaaaggctagggtactccactaccccgggttatatatctctctatagagacgcgattgtagtaattgatatactagtgctaggaattgaacctaaaccctatagaataataagtgactaatttgttatcctataggttacctttagggtacttactactatactaccgctaccggcaccgctactaggaatatatatatatatatatatttcatttaccctaaccccttataataaaagtgatatatagactaccttaactatatatatccctatatatatatatagagtgatctacttcctagaaaggaacttagagccttattaaggcctcttatagcctagttaccgttcctattattaggctacccttatagtatacaactatgaaactgttataacgccttaataaagtctagtatagcctaggcctttttagcttataagatagtatctagtttaccttttttaccttattttaagcctcctagtagacttaatatactattaaacgcgttccctacttctctccttagatttctttataactctactagacttaggtagtctataagtatataggtaactatttcttatatactacaattatagcggttatccttactatagctaatcttcttatagtaggtagatagctaattgtagactatatacagctgcgttagtagatatacctagtccctaggtaggcttctatacagcttcctagtatatattaccagtagagtattattaatcttctgtagataactacctttattagatattctctatttatattcctactaggaggtaatatttctatagataaataccctcttccttataagtagtaggtagaaagggtaagatttacctaggctagctgtaagcttcgctatttagtctatagcgttattactgggattattataatatcctagtacctactaaaggtatagtacggttcctacagtctagaccttagtagcagcttagtagatcgtatggacgatcctttatcctaacttattccttatactcttaattacttataaggctaacttactatcgcagaggattattacagtcgcttatcggtcttctagtcttggttaccagtaggccatcttaaacatagtactgattatatagaagatacctattagctccgctatatataccgaccagcggtctatcggtctaacctagacctattaggatttgaccatctccatatcgtcattgaatgttaccaccgcagctcctgattgactatcgcgtcctgaggcgtccgaatagacgatgatatctgatattgagcggattgcctcggcctgttctatcgctgtctctcggtctgaaccgacttcgatctccacgaagggatcgagccatggcgaggctgtcttctcttgcggggaactatcgaaggctgaaactcctctaacgaaaaggggttggtcgtttcttgagtgtttgtgggtgtggcttcgagagcccccgcgggtgggtccgccatcggtttggggctagctcccgctcggtacacaatcacaacaattttatatagaagatgatatcaacaacgccttatctcgaagagtcaaacggtcttttgtcagcaatggtcgaaccggaccgctggcttctccgctaccaggatggatcgaaatcagtttcaccactttactctcgtgaatctttctcgtaccctatcccaaaacatgccaatcttgttcaggcctagcctatttccaaatgccgaatcgtattgaaaccgtctctcacgtgataagaggctctataaattacctgtaatatttttgcaaaccctactgactttattctttcgcatcaccttgcctggcagaaggcaatatcagaacaatcagaatttctgattcctgatcattctttttcggaccatatccagatgcagaatctggtccgaaactccctcggcgtaaagaggcatctcgtattgacgttgtgtcgaccggatctaccaaatatgtagctttttggcctggtttgccatcaaacgggttatcacgtgccatgtggtgattggcttaaaaggtgggactatgagtcacaaaagctcaaacacagtcaagagccccgccacctttctccgcacagacttcattcagtaaacaaacaatcacttgttcctgttgctcccaacactcatgtggaaaatcctaacaatcctggatcatgcttctgaaccgattttattgcacgcgctgcgcaatcagctttaaaactttcttcgcgaggctgcaacatatctacgactctccatatcatcatatctgctacatttgtttcccaccacaagatttcgcgaagatggttgagcttgatgagcacctcggaactgaacacaactactgtatttcctgcgacatccaatttgaaacagcccaaaatctagctcagcacgacataggagagcacaacatgtgtgtcacctgtcgacaattcttcggttctcgatcaagtttatccaatgttagtttgtatctaatttcccactacgcagcaggtaagattcttaaacattttatagcacatgaccacccacatttgaaagccatcttttagtatggaggatacatcaaacgtccaatgactattacacctcaggtggcaatatgtgcggagttgagtgtgcttgtatgttggttggccacgaatgcgagcgatgacgtaatggagactaaaaaaatgaacggtgaacctggtttcttcatccatcaatgtgggccgagaacagtagcttttacaattcttgctgaaccctcgtgataaacggtggctggatatgatacagcggggggcgaaactttatgatgttgaacgttattgtagttaaggaatcaagtaacaagtagctggacaggatcagtgcaagatggctcaagtcgtgatatggcgccgcgagtagaatacttccaatcatctcgatttgaatgatagcttattgtatccaaaacacattcatgcatttcggcaagtactgcgtaacactgaatgtatcagaggtgcaaggagccgagctcagaaaatatgccgggacaattgacactcccaaaatgataaagagctttgccaaaacgttttgcatgagtcaaagcgtgggtcgagagcaataattcctcataaggacactgttcacctcagactgaatttcacttgttgatgaccccgcccgcacagtattgatgatgttacggacgtcatcatcaccagagtcctggattgccctcaaaaagtcgttcaaaaatctttggtagtgacggagttctgcttctattttacttgcgtgactcttgcgtcgcttgtcggagctcatatcgaaaacgcaaatagagccacgcttcgtgcattccaagcatggattctcagaactgcactgtcgttgaaaaccaacaagtaagcatctaagtatacaatataatccaggatcctttaccttggtccgccggcgctgacattctttgcaggctgctgagagtcttcgtattaggtggtcttgtaccgggggtttcccccgttgatcagatatcaagggtttggtagctggcgtataaggctggataggcttgaatcgtgaagtagacatctgtatcgtgcgcttggtatcaatgtagacgcggcgggggttaaaggtctgcgtaagagaggtggccaagcgtacatcacaagcagtaagaatggtggaggcccggggaaaaagaggagccaggcagacccattgctgactcagcattctagactcgcccgaataccttacggtctgatacaacagctattttaggctgttatttacagctgtacagaaataacgccaaggaaggggttcaaggacagcgtaactgcaataggtatagcgtgtttcaccagagagtttgagaaataatctcagtgagcaaatggtgaaactgatttcgattcaccctgtacaatgaattccataatcatttttacaccttggcacattcctccaacagctccctagcctaactcattcggattactgatggccaatccgatcgacccaacgtgagcatgatcctaggagcgacaaatgtagctccctaactcaatatatcgtagtttgattaaagaaacagctagctggatttagaccaaaataagaaatgtaaacgcaattaagtacagtagcgatagaaaattaagaggctgctcattatcgatagcgttataggccgattcaaagtgttcgagctctcgttataggagagtgagaaaacggataactttcaagaaatattactatagaaatcgggtgtattagatatatgatgaccgttatacacaacgacctcgaaaaaacgtttttacttatttaaggaaactattttatttaatcgattactacctcagtataaaagggaggtactgtttattagatttaattggcttatatatctctacttattttaatatctgtgtattccctaataccctaataccccctatatctactagcgagaatttcttaccctattcttataagattattctcagccgtttactaatacctaatattactatatacctatctttactatattactatggcaaatttttagtcatctactcgttagagaataggctagccaagatatcctatagactcttaagtctagttatatagtcgctcgtataaagcctaaagtagtgtaagtaaaatgtggtatctatatagactataggggtatatatatatattacgtgctttttactagattaccttatataatatatattatagtgtacgccccctagattatatagtatataagatagatagaaatataatctatatagaaccatataattaggttccctttaaacgtaaggaagctatattcctttacttccttgtataacgccttttatctaaagtcgactatagtatctcttaatattgattatttatctacaaaacttcccttaggaacagagtagtagtcctaaggatattctagtaatcctagggtagactgatattctaaaagatagagttagtgctcctaaaggcagagtcagtattcctagggatatactagtaatcctagggatatcctagtgatcctagggatagagttagtattcctagagatagactaatattcctagagatagagtcagtactcctagaggcagagtcggtattcctagggatagactaatactcctaggaatagaccagtcctcctaactaagttaagattatacacaaaatatatatactagaaaaaaggaaatacttgtagagttataatattaataagtaataaaatagaaggtagggtttatatatctttaataatagtaaaataagaattaataaaatactaaagaatagctaaaggtagtaagaatatactagtaaaattttaaggatagataaattagcttagaaatccgagtataaaagttttattaaatctttcctaaatttaaggggtactagttataaaatcatttaatataataaggatttatttttctaataaaaagataatagttattttatttatacctatagttaactaattcttctaatatttatatatatatatatcgtttagctctaaaataaaattctagtataactagaccttagcttaatatattattataatattattaactagctccttaaactttagagaagctaactagtttttagtatagtaggtattaatatagctatattaataaatttactagagatagttttaggttagtataggctataactctaaaaactatagtttctagagagtgatactagtttttaacgctttaaaactatagctatttaaaggttttcagaatccctaagaattacttaatctatatatttagttccctaatctctttagctattcttaatagtagtactttaaggaatctcttagtatagcttctatacctcctacctattctaatcgatcttactctattaaaaagttaatatactaaaaacgaggttattataaattaagcttaataaaaaaagtgtctaaatatagtaagatatataatatagatatctatataggtatataccttcgggaaaccggctaagtatttatcctattagcggatactttaggattttaggtattccttagcttataattagtatatctctaactatacctttaataaaaagataactaaccttttaagaattcctactatctatccctaatactagtaatagactagggtctagaggagcttaataaagatatactaaaataatatatataaagttatataactaaaggggaacttatactagactagaatatttgcaattaatatcttatatataatattttctatctataaattagaatagctattatattaatagattaggaattagtaaggccctaagggtaaagtataataacttatagttctaaagtagaatctctatactaaataaagagttcgcggtatattcttatataggttatttataactacttataggcctaaggataggggaaagtagatagcctatatagttagcctatagtatatataattcgagcgtagtatagataaagtgacttctagaggtatagtatagaaaaggctatatataaataaatgagaagttttcgtaaaggttagagaactattaactagttataaatcgataaggtatatacagcctagaaaatatggtagaaataggcttagtatagggcttatataagatatttctaacctaggtaaaattaattttttactctagacttaggggttacctaggtattaggaaaaatacactgatttagagtagagactactatctacctaataatatttaataaatactttagttatttaaaaggaaaagaattatttcatttttcctaagacaaccgattatttaattaacagccataagtttacttactattagcccttagttcttaccactataggccttattcttattcaattaagcagcttatccgaatatataatattcttatatattataatattatttatataactatataggtttctttaaactatatctatcagccttagaatttacgtatagttatctacttaggatctaagtctaggttaagtattatatactttaaataggatataaataaattggtttttttttctctctaagaactttctttctatcttatatttctaagtaacttataatttaataattagttataagtttacctactagttaagagggtatataaagtggtagttaaagtatagtagtaaactaagggccccttccctacctaaagtataagtctatatattttataatctatttatatccctagcttactaactaaaaattattttaacctacttactagtacctctgctctattctaagattttaggtaagaatagagaacttaaacttatttttcctaagttatactaatactataatctttactctatattctaactatcttaacttatagtagaattagacttactctaataaggtaactatattctaggctatatatagctatatataggtataagaaatatatatataattacttatatatattaagcctatagggttaagaatatattatattctagccctacttttatatatataaactagtattacttctattatacttataataatagggcttataaacctccctttatatatttagaaagtacctatttatatatagtacttaattacaatctctagatataatctaaatatctataaaatagctatatagtatctctttatagctcttttagaaacttataaatatagaagaccctcttattagactaaaaattcgttttatatattagtaaacctataaatacttatagcctaataaagtctttttattatatcttcttctagtatttaaagctatttaagtataagctagtatattatacctttaacctttaatagcgatagcctttagagctttcttaagtaaattaatatactagctttaagccctaagtcctaagctatattagttataattaaagaatttagctattagtataaataggtttttactagaaataaggagttaaggaaagcctaaaataagatctttaatctaaaggaaagaaagtaagttactattaaggagatatttatagctaataagagggaaaaggtaaagtaaaaagaagctcttagttaagttaatttactttatatattagttaaatagaaggactaatcttttactaaatactctaagtaagtataagagctctagtagtagatagataatcttaagttatcctacttattagagcttagtaaagtttcttaattagctaaagatattagtatactttaatagaatttaaaagagaaagataagattattaataaaataaaaactattagattaagtcttaaaataatgcttttattaatatagtagaaaatagaagagttaaaagctaagaaagctatactaaataaagaattataaataagctaaggctaactctaaaatatcgaaagctttactattctataattagagcttaataaaagctcgatataagttatatataggtatttagcgatatttatatactaatatattttacctagtttaataaactttttagatctttagatttttactctaaataagataactactatcttaaaggaggatcttatagaaaagatcttaaaggtatatatatatctagccctttctataacttatctacttatttatttatcctaaaagatatatttatctaagaaaggctttaaaaagagaatactaggttttcttagtaatatatccctataatacccttaaacttccctaaagctaaagggatatacctagctataaccttagctattcttttaaaggaaatttataaaaatatcttttagcctaattatattttacctaaagattctaaaatctatagaatccttagttaccttactaagaataatactaagaaggaaagtttttaccgatatattcttctcttacttagtcttaatactaaagagagtcttctctaaataagggtttagataatagtctataatatattattatatctatagaaaatactcttagaaacttagtataatttaatctatataaatatagagaggattatataaaaagtagctaacttttagcttttaatctaatatacttagtagagatataagatagagtttaatctaatggctaacttttagcttctagtctaatatacttagtagagatataagatagagtttaatctaattaatcttaaagataataattagaagccttttcccttcttaagagataatatagtcctaaattactaaaactaggttacttaagatataaatattctaactatatttctatatatcttactagtaaaagatagtaattataacctattaacttagataacctagttataaagtttatagaagctttatatagtagtagagtataaagctagttaaatattaactagcttagttattccttaaaggttattaacctactctagatagaagtctattacttataataataagtaactaaataatacctcttttttagataaaagatagctatagcctttataatttaattaggaaagtaatccttatacttatctatagagttttatcctactattattagtaattataaagtaagtaataaatagagattagggattttttacttatatatcttacttatacttattttattctaattatataatatttatttaatagctattactatattaactattaagtttattatagtagtagtagtagtatttatttatattaacccttataaagtaatatataagtttattataggtccctaaaaatatctttattattctagtaacctaatttagactaatagtactctaaataatagtataagagaagccgattatattatattaactagactttagcttaactaatttcctaaattaccttttatagtaccacttatttttaagtctataaataattattttagttacttactagtttatttaaggatatagagtaatagaggtttctaaaatctttctttaagtaattttatagcgaaaagctataatagtctaactttattattaactataaataagagggactaatataggatataataagctaaaagtagttagtatttctatatactctacttagagtttcttatttaaatataaataatctataaatatattattattagaatagtaaagacctatatctaatatagcttactttaatagactttattataaactaagtttattctaagtaatactaactataaaaaggctggtatagtataggaattaagctatattattagagatagtttttttataatatctataaagaacctaattaattatatatttaaactatacttatagtatatagtctcttatactttattagaagtataaggtatatattttagttaccctaatcccttataataaaagttaacttctaaagtagactaaaatataaatctatacttagcctagttagctatagtttagaatagtcttataagtataaaaaaaaaagtaaatatttaatctactaagttatagctaccctatcgaagtataactatagtatatactttattaatatattataatagctattattctttatatctaatctaacttagtagggccctagttaaattattttataacccttagtttatatatccctaatctctttctccttctcttttcctacttattttatagtatattctctaaaagtaaggataataattattatagttatctatagtagtagttttaaagtacttatatctaataactagtctatttaagagatagctcttaatagatataaagatttacttacctaataggtagaacctatttagactactagataggctatataatatcgattaggataatatatatctatccctcttataaaatatacccctccttatccctactatctattaatttattagtataacttagccttaggatatataaaagtcttatatttaagctaatataaagtatccttagtagtctaaattttagataccttttatactaactagtataactataatagctattaaatatatatacctttactctataataatagataatactagtaaatagtattttagaatatactaaactagatactagatataaataaaaaataagaattaggaactttagctttttatataactatactttatataagttagcaattagtataggaaatattatactttttaaggaatagtataaataatttctttaaatagttaaattacctaaagagtaataactaagaccttctatataagataccctttattctatctattaataagctcctactaaagataaatattaaagttacctctaggagttaatacctttataaggtttagtaccctagttactatagagtaatctaactaaagattttctttagggctaggtatactatagataatactatattctaaagaataccgaatcactctaataaataacctaagggtatctccttcttagactaaaataagggggtaaactataagaaagatattacctttagattaaagagtaataaaaatagacttattctatattatttctacctttagctataagttaaagaacctactaagtataatagctaatagcttatataatccacttaattagaatatagtttcctctatattagaagactataggttaatagtactattctatatatttttaggaatactaagtctatctactataagtagttagcttagctatagtctttctataaaattacccttactttccttagctatatattcttctaactatttaatatagaaggtatatctttcttcctagttctagactatctctactaaaaaagccctagattctaataagtagcttttatagaagcggttaaattcctttatataatataagagaattttattaatacctatattctatatcttaaacagttatttctaaaaaagatagtactactattaattagtaagactaagtctataatctacttcctatataaagtacttagtagcgattttcttagctattataaatttattaaaagagcctttagatattagtaaatcctttagattaaggagcttagtaccttttttaataatttcctaatatatagtcttattaaattaagactagatactattacttactaagaatatattctcctacttaattagctagattatattagggtattataacttaataatattatctataaaactctaaattaccttaacctttattattataattacctactttaaatagtatctatatcttttaagtagattattaagtttaatatagttaataaatatattcttaataatactttataatacttttctaccttaatagttatataagttagttaaaggtactatagttaggagtaagtttatcgctatattcgctttattagttaatagggaattagttagtatatctcctaaagatagtatagtattatttatcccttatactattactttaagagtagtcttatcttttaccttaactttattcttccttttctttttataagatagtatatctagccctatatattctactttacttcgttttttaggtataggaaggaactgataagagctatactttactttagaagctagactagctataagaataggaggaagaggtagtagatctattattcctacttactatcttatttagtagactatatatattaatagaaagttactctaatagtagtctaggggcttactaaagttagaaatactaagtatatattacctaataggcttattactatagttactaattttatatattactagtagttcctagattttctctactattaaagaccgaaagatttcctctatagttaattatatagtaggtataaactctaactaagagatattagggaaaggaaagatattaggctactactattttcggttatataggaactactaatctatattaggtaatataggtctagactatagctaatagaataaaatagaaagaaagggaataaatagtatatatcttataatataatatattatctcactactagtaatttatctatatactcttcctattatagtattactttagtaatagtatattatataggtttcttcggtatatcggtctcttttactttcttatactctttaggctaccgcttcctcttaactttctactttactagttctaatttaataaaaaccgcctctctctaaacttaagatagtaatatagctcgctttaaaaaagataactctctaatatatctataaaatacctcgactttctatatctctaggtatacttttatctactaaaggactagaagctaataacctaagctatattatatattatattattctaattaaatatagatctttataaaaatcttcttatcttattaaattacctaaatctcctatttatattatatcctaaagctacagctttctgagcctaagatactacccttagtataaaattaagggataatctatctaagtcgcttatatattaaattaaagatatacttataacagaggatatttaaatatactttatataagtagaaagttaaggtatctaatatatattatatatataaactagtgtaaacgagcctccttaatagaggtatataagaatacctacctcttagagctttaagcactaatcctatactatcgtagcctctaataataagactatagtccttaataagtggtatataagttagtattataggaataaaggcaggaactctgcagtattactaaatttaattcaggaaggaactactctgatttatattaagataagtactaaccgctttaggatactaattatacttaaaatatatggcctcaagaatttctagagctaggacctactagtagaaagctgattggactagttctttagctaagctctaatacacttttattaaggtataactcttctattcgaacaaatcgatagataactgcagctctcttaaattataaagatatttacctaagagcaaaagaaggacggaagcaggtagaagaacgtgagaagcaatcataagggagacaaaaagcagaagagtatactaatatacctcttttacagagcttttacagtaccactatagcgttcgctcctaccagttataagttctattactagataaattatatagctagatttattagttttacacctccctatcaattaactgtaatagtatagaagatagtgatttctattatctatcagtacttcagtataaaatatttttcaactattataagaataccgcggtactttatactcctataaacttcactagtagataactaagctttatacagtataccacgtttatttctcaggctcctatatcgctacttagaaccgtgattaccttactctagattaaggtatatatctcttatagtctaatttattgcagggtagcttatctttcttctatatagggcgaatttaattataagtaactatatacttcctaatttagcggctctttatagtcaagcttcaagcttcttcctactttacttataaagcttctaatgaaactgtggactagtctgatacttagctctatacagcctctaatatactttttagtatagtaagtaggagagtgaaaggaaaagtaacagctattctttatataaagtctataggcacaaatatactataagaaggactctaatagacctataagctctagtataagccttaggcgatatagatatctacttatatctactgataatatagttatattatatagtaagttattaagttaggttattaaagataagttattaagaaaggaggggtctagggctatataactagattatattaatattaagtctatatattttgttttacttatattataaaaacagttaactagctaaagtggtcttaatctagcgcctatacagcttttagtctcttataactactaagaatcaagaatttcagttataatagaccgctgcacgtttttaatatctagtatcgaatataagacttatcgacttactatctattactatagagttagtataatagctagataggacaggaaattagtaactaatattatatatttccttaataaagaaataccctcttctaataatacagtctataatatagtctcgaaaagatttatcttaatcagtcgctatcttctatagaatcctacctattcttataataaggtaagttatagcggcagcccagatattaattagcctaggattaaattccttatatagatattgttctagcgatataaaagggtgtgaaccgcgatatatcctagatatatatatctagtttttctacctaaggcagaaacatttagcgctcctaaaatcggaaatttttaggcagctattagagctaagaagaagattctctagctttaaatcgcgataagtaattcctatcttataaatatagttaatactatatataagctgtttaaagaaacaatcggcctctaactcttctaaataactagatatagctactaaagaatacagatccctactagagtaatactctaagtatttataaaagctattatttcctatttaaagtaactcgaaagtctaaacaatattttaatattataataaaaaggatatataaaactcggatttaacatgcctctagtaagctatttcagttatttatactttacagcggaagattttaagtatataaaagcgataaatattcgggttctactcttagattttatgtaatagaaaaacggccctaaataagctatgacctagaatatcgtatatatccctatatttctaggctataagtgctatattttccccagccataacgctagttttttgattctctatctactatttctattctgaatccacggacagttataagtaaggttttataattatccccttctagtatttctagtttatctttcgattctctttacagaagagtcttttcgacaatagtggtcttagaaagtagcagtgatccctattctcaagtataaaccttttattcctaaagatatattttctaaacgtaatggttaggactagaattatactatcggttatctctatacccactttagagtagatagaagtttaagatatataagaataattgtatctacaatcgctaggacctctatattatcttcctagagtataagaactaaagtatttaaaagttaactgaagtagcttttaaagataaataggtatattcctatatcctaattagctaactaggcttactcttagtaagttaacgaaattctaacttaatatactttagtatatcaagttatttagtttactaggagagaatttatagataggatagattagatatatcacatatactttcgtaagataaggtagacttcctatatcgcactaataattagactagggaattagccactactctaaattcactaatacctagttcttagtcttagcaattctctgtttataggaactaggtatccttagtatatagagactgattcttagcgcttagaagttctcagcagtattgctattattaggtagactccaactagacttaccgcgattaggatatttcttcgattataattaaatatcggattataattaactactatctaatagctactaatcataaggcgacgtacccaccttatagatacagcctaacgtctcagcactaagcctataactagtaatagctcctataaacagtataatataggttactacctagtaatctaccgataaactaaagcttaatatagggcacttataccgactccttattataactaatcgcagatatcgtataagacctaataaatataaagcctataatccctatatagagcttatatctagtttaatactttagctagtagatactttaggtaagacagagaaataagcggcttagtaaccattatacctagctatagctagctacttaactaaaataatctctaatactagataagaaaaatgatatcgcgcctaactctaggtcaggcagtagtctactaagctagccagcttatatactggcttataaggatataattaaagaactcactactaagctagacaatagtctaccccttaacaaagtaagtcatcgtttctagcaatatggtcctaattaactagataaaggggaaggtatattgttagtcaagatttttgtacagtaggtagctaacgcaataatactagtaagagactgctatcctctttaattaagccgaggaaactagttaaaaattgtctaattctaatctagtcgtttattataggtactgattctagccatagcggttagttttagaattcagtcatagattaagggcagagtgatctatatagttattatcttaaatattgttattagattctttcagaagtataccgctaaaaagactatagagtcattacattcgctattattaccgacagggactatcttaagaggtagacagatattctcagtactattatctaagattataccgggtaatataattaagctaaggataggggatactattctagtggatatttagtaagatgattctaaagttattaaaggaattggtaggccttttactaataatataaaagcctagttgaaatagttaacttcgagactaataaagctcttctaataggcgagtctttacctatctagaaggaatacaactcaacttttaaagaggatactaggcctagagaccaccttaacattacctacagttctaataccgttatttatggtcgtaggtatagtatggttatcagtataggtatatttaccgaaattagttctattaccctcacattataggctagcggtagtaagcatcgtcctattaagcatagtcctaacggtaagactaagaagcggtagtatatttaggcctagactcttatatagatagatactataggtcgattccttagtattaatatcagaactctcttataaaggaagcttttaaaactagcctatttactatttagaattactattatatttaccattatttatatagctataaacttattcagtagtagtaaggaagttattatatatactattacaaccggtattagtatgattccagtatatctaatagttatacttactattataatagtagtaggtactaaatatatagttaagcggaacgtgattatttataaattagacttattagaggcactcggtactattatagatatttattccaataagataggtactttgacttaaggcaaaatggttatcaaaaaggcatagatcctatcttaggggatatactctgtcggctcgtctaataagccttttaatctaactgttagagatattacctacactcctattctacctttgtaactcattaataaaaaggaaggcccccctatagaaagtatagaaggtctagtctcaggaaaccgctagctagaagacttcttagatatcgcgtctatagtaaacctctcttacatttataagtctaaagagggagaatagtatatataaggtaaacctacagaaattactatttatatttttatattaaggtttaactagaaccgcgaccgctagactaagggttaaggtacagtatagtaccaaaaggctaaattcctatttaactcaactatcaaaaaaatgtccgttattttcaacaaagctaccctatataaggactatataatagtatttactaagggtacagtcgagtgtatcgtagccttatataccttaattatctaggactaggatttgttaacccctgtcctaataactaacaactaccgcgaaaggatactctagaatatagaggaactcgctaaacagggacttcgggtattagctttagcctatcgattgtatactaaccaggtataactacttaaaggttctaatctaaatcacaaagatatagagaatgatttatacttccttagactaattggcttatataattccctataccctgagatagtgggcttaatctaggcctactaccgggtaggtatagttatctatatagttactagtgattaccctagtactaccaaagcgattgcctagtaagtaggaattcttctagctagttttaatactatagcggctgatatcgcagatactatagttataactaccagtcaattcgataaccttactaataagtaggtagatacgcttccgaccctacctctagttattatacagtatactctatagactaaggtatatataatcgatgccctttatcgctatagttactttatagctataactagaaacagagtgaatgattctccttcgcttaagtatactgatattagtatcactatagggcaggtaggtttagatatagctaaagatatatctaatattatacttatagataataactttgccttaattcttaatactattaaagaaggtcgtcgtatctttaataatattcaaaaattcatactttatctattattagaaaatatcgtataggcctataccttacttatcggattagctttcaaagacactgataatcaatctatcttccctctatcgctagtcgaaattctctagattattataattatatcgggtatacctaatataggccttagaatagaggtagctatacctaatattataaaccgtcctccttagagtaagtagggtatatttacctaggaggtaattattaatattctagtttatagtatctagactatagccctctgcctagcagtattctctatctatatatagggattcggcgacagtaacctggcctatagctataataaggaatagttagaagagattaaagactataaactagtcttctaagtatatactataacgtttatatacttaacttagtttatactattcctagcttaggaaatagttaacttataccgctcgtttttctatatatagctaaaatctaagaaatactttacctaatagatatacaatatctagtagaataagttcctcttctagtctattatagccggatagatcactatattccctattctctatatccctattttaaacgatattgtcttcaaatataaacctattacctaggaatagggtatcgtagtagttaaggctatcctattctttattggagtcgaagcctagaaataggctaagcgagtcttctttcattatagagtgagaaagagcccgcacttaacccccttagaataaatccctaagcagccctaatatatactttccttagcctaatatcaaccggagctagggaataaacactatcttagtacacacgtattataggaaaccacttactagaaaacagaatattattttatagaaattacaggtatatagaggagaagggaaattctagaggaggtattataacagattataggtaggttaggcttaaggagtatattgcccctaggggttattttcttatacactaaatatatacttggttcgattaaactttatttctagaactttactaagaatacaaataagtaagaggagagaacttatagtaggtaaattatagaaataattaatataagggggtaggtagccggtagccttagaagagagggaatttgaagcagcgatatatagggctggtatactatataatcagagttattagttagtgccttacttcctctcacttattaaagccccacaactgctcagaaacacattgaggtcatcactgactctgagctcgtactaatatctaccagtgagcctaagtctaagcgcccttattaaagcgacggtatcccaagtaggaaatccctatccgccagggaaaatttggtatatatatactggaaagctcctgtcggtgagtcctggtcagggcggatcatgcttagtgagcaagagcatgatcgtggtttctcttttccctaaagcccgggagtgcctgggtataggatgtcgcacgtgacctggatgacagattaatcaattggttctcaacggcccgtcagcagttgaggtccccacatgtgattggtgactagcatgtccgtaacaatgcgatttggccttcaaccctctcgggccataagattagttccctggaaccattattgtcatgttagaacacatttgatgttatataccaatactctcaaataaacctatatcaatctttaagtctcttcgactgacacagcgaaggctagacacgggccggtcgtccctttgctcgtttttttacttccgctcttccgtgtggatgagatgtacatccgagcgcgtcgtatcctcgtcccaaatgaagccaacttcaatctctttatctgtcccagattcttatatattagtcgaaagattcctattataacattgttataatagcacaacattgtcatacagaaatttgcgagcaagacttatgagacttccttcagtcaaacttggtttgagccttatccctatctgggtgatcttcttctaggcgttcgcctgggagaacaatggcacggtcgagcttgtagggcagtccgcggtgacggcctcggatcatcatcacacaaatgacaagcttgctgaaaacggtaaactttccagatagagacgtagaaacagttggatacccaagactaagtccaacgttgccacttaatcgaaatcagtcaaggcaaaaggagtaaataccgcatggataactcactatgccgagacaacttcgaataacacagaaaatacagaaaaggcctgaattggttgaattttagtatcgcgaaatttgagaccaatcacttactggaattgacgtatctgcgatcttgccggcctcggcgacgcagatgcaaaagctgccgaggaaaatgtaccacaagtcaaaggtcagttggttctgaatatgattgacaatgtaagaccggccgttatgctcgtcgatgttaccgtcagtggtatatacacccagcgttctttcttcataaacattggaagctctgatgctaatggcaatcggaaaaatcgcaatatacatcatgaccaccaagctgaattggacggctgggctcacatcagccaagttgaaagttgatgtacccgtatgacgcgacgatgcggcttggaaaatagcagcgaggactcgaggaccgggtgcgagattattcacggcgggatttttcaagtccagcacaatgatgagaataacatcgattgagttcataaggaataagattccgaagagaatccacgtcggcccgcttgggaaaagcagcgtatagcaccgtcgcggatgatcgagcagaaatcttagtggatctttaagagaggatttagccgggcaaaatttgtagaaaatccagataataagtcgaagaaggcacggataacaagtgttcccggcaaatgcaaggaaactcataaggatcattgggaaagtcgcatcttgaaacgaaatcatcgaatctggtgttagagtaaagccaagattgtcaatcatcgtctgagaggagtaaaagcccctatcgcgcggtaaacgagatcagcttctataccgttgattatagttcatggagccgacttaccaccaaacattgccttgcccacattcagcaaggtaatcacggtatttcggatccgcgtgcagaatccaccccacaaggcagattgcaccgaataaatgcagaccaaagaaatatccaacaacaatttttaacaggagcttcaagcttcgatactcgataccgccgagtgtttcccgatctttggcagacagattatggaaccgagagttccggcctattgtagcttgtgaagacatatgcggcaaattgagctgctttatgtccctccgctttgtggttggcatccctcggtcagagctagaaaagcctcccaaaataaacacggaggttacaactcgctcaagggtgtgagtacgagactgcatgcttctagtagtcggtcgacgactaaggactttctcggttcgtccttgtaagaaccaggttagcgaagcgattaacttggagttacgtttaggcgcgaccttatcaggactaaccatcatcttcatcatgaagcctttcatcaatctcagaaaacgaggcacctgtatagtattgtgagaaacggaggaagatatgaacctgatttgtgtatacctctttcacgtttccacggaggcggaatatacagagctttatccttgtcggaagacggccgattgtcttcagcgaatgtaatggtttgctttgtcggattgatgttcgaaaccgctgtgtcatcggcttttgcatcgttcaattccagggaaactctggtgtatgagttagtacccattacgtttgagagtctgtagctgatcgatggcatcgaaaccaacctcgaaaatttgtcccaagtctcaacacacgccttttctttttccgagtcgtctatttcgtggctgctaaattgatcgttttgggcttcatcatcatggttattcaaactttttttgtgcttcaactgtgcctctgcgtcttgttcggggggagcctctggtctcaaaaggttcggagctatattttggagaagcaagttagttctcgatgatggcgttgggtagggggttaggtggtggaagacttctaaccgattgctttgaagcgcttttcaaaccatcgaacccgaaatacaattacgatgatgttgatgaaccccaagtttcctaggatcggaatgaggtataggtacacttgttggtaggtctttaaagatttgacgtcgacacttgacacccatggaaagtctttgtttagccgacttataaggatggaaaaaataacaataaaaactcacgtatttagacctgactcagtcgacgcgctggctccgaaaaaataagcatcgacagctttcagattaccatgaggatatatgataaccaagctcagaacgctgagggtgataatccacgcatctgcgaagaaggattagaaggggatattgtgtaactgccgatggacatacaatgcagggcgagaaagtttatcgatggcttccacatggcacaaaactcgcaggattgctttaggaagggttctaaagggcctgccaaattacattatatagcgcaggcttatcgcaatttgaataattaccgatacaacataaaccagagcgatagaaggatttgagtgtgagggatttgctaggcaaatcaagtttggccctgggtcgctgcttgcggcttgactaactcgcttccgtggctagcgcgctcttcgaataagcgaggctgagcatcatatagaaagctttaccccgtacagttaaatcagctgcctggggcttatttttaatattctagtaatatcattggccgaagtgtctctctcgtagcacgcattgcctggtagataacttctctttctcggccttgcgaagccttccattccagcgggacaaagagatatcaagcgactcgctagtgacagtcgacgtagcagagggccaacgagccagacgtaatggctcgcttttctaagacgatgttgacgaagattggtcaaccattaagaaggtaggcgggtagggtgctaagacattagcgtgggagtggtacgaagaataccaagttctcctgaaattggtagattaagctccgctccattaattttgcaatcgaacctgtgtttgtcaaaaatatatcatgtcctctgagccaaccgtcttgatgggctatctacggcatgaacttcttttgggtcactaatccacaaaagcagccccgcacgtgagcgctaacattctaagggaatccacttatgtaaacatgtcttacatcttgtacagtagtagaaatatgatgatcatgatggatctgtatggcgcaaaaaaatcccgctttttgcatcaaatgactgtttcccgccaggcaaatcaagggaatacttatatatgcaagttcaacctctctgatattacaataccgaccagcttttgttttatataaaatgaaaggaaaatatgtcagcgactccaaatggcccaacagcctccactgctgtcaccgcagtcatatgcgctgccttgatcattggtctatggtgagtatttaccagacattatcaacgaaccttaaagagtcaaaataacctgtctatttatctagtttcgctgcctttactcgttggttctgttacatccgaagacgttccacagaaggaaatcctgcggcagttcctcctagcgttttccagctgcaggcaaaccagtccaaagtgcaggagaaacctctgaccgtagaggacctcaacaaatacctacccatgatcgaatacaaaatgtggaagagccaacaatacgaacaaaggtgccatgtaaacattttatttgcctgcggtacaggcttgtgctaatgagtgacatagaatgagcttccctcaaactgcgactgaagctcagaagaccttgtcggaccccaatgtatcagcactacttccccaatctcccaccgaagacccagtgcatttgtccaacttgaatgcaagtgtcggggctcaaggtcaagtaaacctttctgaggaagttcggagtaaggacagacttttcgaattctctcttaccccgaaagcccctgaaagtagttgtcagactatacagagtgccgtatctccagtttggccggtagaaaaaacggtttccggtgatgcatgcgctatatgcctagataccatggaagatgagatcaaagttcgcggcctcccctgtgaccatgctttccatgttgactgtgtggataagtggttactctggcgtcgagcgtgctgtccagtatgcagatatgcttgtaagatacctccgaaagtgatgtaaaaagaaattggatagtatattgcttctttggtcacaatgacctgcctgaatgcttcatttccgaaggtgtgtccaccccgcaagaggtatagtacgtagtcatcgccacgagagcgatgtctgacaacaaagattggtttcgcatcaaaaaaaagaagaagaagaagaagaagaagaagaagaagaagaagaagaaaagaaaacggacgacttgctccaaagccaacaaatcatcgatacgtttcttcacctaattgttttttgtggctcggcacaaaagaggtggggcctagtagcctgccatcatattgggtgagaatacttcggtgtgattgtcgagcgtacttcctagctttagattacagggatggctcagactcatctgacagcggcgactatttttttgccgcgtgaggtgaggcttggtcacgccgttcggtttcccttagtgcggacgatataacaggatgggtgaccaaagcgtgcttatctattggcgagcactggtcttcatggggaagctggcgggtaccgccgcaaacgatagctagcacacaaacccaggcgtgattgtgtggcaaatccctcacgcaaatacgccgctgtcccgggtagtattgcatgcggcaattattaaaatcacgataatgccgcaactatatattgagtttggcaggcctcttctcattcttccacctttgtacagttcggtgcgtcttgtactatgtggaaaccaccaataaagtatcacccgtgcatcgtatgtgcattggtaacttctaaccatcactgacagacccgtggattatcaccctcagcgtgctgagcttggttatcatatatccttatggtaacctgaaggcagttaatgcttatttcttcggcgccagcgcgtcggccgagtcgggtctgaatacgtgagtgttttattatccttttcgatctcaatggtcccgctaaacgacgatacactgttgatgcgttgattttcagcgttgacgtcaagttcttggagacctaccagcaaatatacatatacctcattctaatcctgggaaatttgggatttatcaacatgatatgctacattgaccaggcaagttttctgatttggcaaagggattctttctgcttccgccttttcgttctcgttgacagcaaaggtctcttcaatagcgattgttttcgtcttctttatatcaaggatctcgctttgggcttttcttcaactcctcatctctggtgaatttgttccgctgttgggaaacctcattaaacacggctggggcgattagagattaagagcttgcagccagtactctgattgtttgaaaaagctaagtggtcagaagagatcaaagactgcgaactagtcttccgagcacgtgccaccacgttcgtttgcttaacttggtttacactgtttctggcttgggagatggtcaacatgcgccgctcgttcttccgcatgcagccaaaatccaaaaaatactttacacaatggatgtacgatgtctggcggaacaagtttcttttctggtccatctggccggatggatcaccatgttccctatgatctatatccccgtcttgaacgacgtcgtcttcaaacataagcccatcacttgggaatagggtatcgtggcagtcgaggctgtcttgttcttcatcggcgtcgaagcctagaaatggaccaagcgagttttcttccgtcgcagagtccgaaaatcttccatattgagttcgtccagggacgtcccggagcatccctaacaaacatttccctggcccaacatcaattggggccggggaacaaaccgccacatggtgcgttagcgcacatatcatgacttactagagacttactggaaaaatcaaccatagcaattgtgaataccgggtatcgagagtggattgtggaaatttgtggatcaagggtttgagaacttccttaaatggtgtatcgacaaggtgcgagcaaagcaagacagtgctcacggacatttccggcacgctggtctcaatattgaagtatttcataccaaatgcgttattttgtatgcatttttccgccgtcggcacttgcttatgttaattcctgacttgagatgtgaccccatgctcaatagtcgcgtggcaaatccacatttcatttgacaaccagtgttcatccatagacaggcacttaatataagctgaagcatattgaatttgttatacgtttcagactacagtgtcccgcttccggattcgcgctgaccttattacatatgtataagacaggcgagggagacataacgctaccactagatcctaacttttattccgttaagtcgggtataagaccgatccaaaccttatgatttttaagtaaggacgggcatacgtcatataagagattctagtaaagagatgacttcattagagatagactttcaaattgtattaatatatatatctaacccccaggtaataaacatttatatatttctcgctattatatatcctacttaagccaatttcaccctatctctttttaaataataaatcgttatttatatattctattatccaaagaaaagggcctattaacagtatataagctattatttacacgcctaccatattattcaatatatcaagatcgctttaactgtggtctattaccctatacaaatttcagcctaagcttaagtctctaaaataacaaaataaaccagagccgaaaactaagttatatatagactattaaaatactatattactccctctaggcgaatgttctatttacctggaagagctaggttcaatagccgtctttcgccagctaccttatagctatattatctattaaccttacgcagatacctagctttatattagcgataccagctacccctatatcgctagaggttctattatctacgaaagccacagactctaattataaaggaagcgcggtctacaggttatagactaagttcgctacttataggttataattcagtatattggttctagatcgtaaaagcctagtttaggagaatattatctaggagcctagtagtagccttcggttcctataataggagttgatactttacttataaatactagatttttttaaattaaatctatatacaggaggttcttagattaccccttatttatttaagcagtcgttcttcttaatacctcttactatcttataagtcctctaccatctactaatataaggtataataatacctagtttctattataacatttctatactactataagttcaactaggacctttattatttatttcgacttacctacgatagatcatggcaatatcccaacttcgaatagctcgctacttagcagagtgatttcgtagattcccacaactttcctaagggtagccctattctacacgtactctcgtctatactataactaaagtaatatacttatataatataatatatttagtaaatatataagttagcccattacctatatctctgcctaataggtaaaacggcagctattctccctatatagataattcttctttagcttcccctagtaggaatccgaataattgactataatcttacttccagtagtcactccgcgagagactataagtatatattctattctacattagtaaaacttctaaaactagctattagggtaatataagtgattaataaagtaagtaaaattacctatttaaccttagaagacctaatatagtcgttctgggcttccgcctatcattacatctagaccttcaattccttaagtaataaggccaataaactctacaatagctatacctcggtcgaattccttctaaatattagtgattactatattaagggcagttagtaaagactagataggatatctacatataatatatatagcaggtaattaccctattattcttcctactagctatattatataactagataggagggggataacgaataccactaaacaaagccaagaaataagaacagtaattagagattatattatcggtctattattccttatacagtcgataaatattaggatcaatttcctacctatatcgagggttatctccaccaaatatactaggatcgatcatacagttattcataaacttataattaaagccgtttagtaatattagatagcggtaggtggttttaagcggtaatactagcctagtatctagcgtaacctatttataagggtaaccagagtatcggtaagacccattttagctaataactcagagaaggtcttactaaccagggtagagagtatctacagtaactttaaggttagaagcgatatagtataaccaagatataagtccgttatcaaagcctatcttatatttatatacacaataaataccggacctagtaaatattagactagcctaatccctagaatctttaatttctttatagctatactaaaccgccctagagaataatcaataataaattctaatatatagatataaggaaggggcgtttaaactatagaccgaaagaataacttatatcctatttctaaactcctttttatactatattaatataatataggcttcttttagagctactattcgagcttcagtattcgtatagcttaggaacttaagataaattaatataatctatactttatagcattctacctagtatacttacactactatttccagagcctataataaccggctctagttatagtatttcttatataaaccattaatagcccaaaaaacctataaatatcgctattaggatataataacgcctactaccctagtagaaagaattcgtacatactacttaactaatactagttctaagactgaattctagtctatagtcctatactctagttagtaatagtggatttaactagcgtagacttaatagaaaatatactagaaacgagatactcaaagtaacaggggaatatacttaccgctagatccctataataaatttatctatagaagaggactatagggtaggaacagctatatcctttataggcttcctacactaaggaaagtaggtatcgctatgaaattactaaactaacggttcgattctaatattagatagttatagacaagttccggtatctatatcgctatctaaccctaaatcctctatcgctactactatagcagatgattttaacggttgtagcctactaacagtcttatatctaggattgttaaagctatccttagatatagaggtcactggatacctatagctagattataaatcagactttaactattctaaggatctctatatcagtgactaatagcctctaatctactatcaatcgctatacttactaatactagggactttaaataggtaacctagctaggcgttatagttaggatctagttattttctacctttaactatccctaaatagtattattaatataggtaaggcttcgtctaagaggtttatagatcattttatactaaaggtagcgaattgtcattctaagtagttattttcgatttaagactattcgaagtatatactactatattaatatataggtagataccattatataggccaaaagaggccagtataaaggctagccggctagtaaaatctatattctcgaataaatcagacaactttttcacaactaggtggtatacaatcggatatatcgtcagtaagttagttattacctaatgtgattagatacagtcgcctatacctataagtattaattctacctaggtagaataagataactcagctaattctaagagaatctaggcttagcttagtataaccttacggtaacgtgataataggcttttagatctttcggctctttaataggaaacagatatgtttatactattaggaaggcaataaaagtatataggttactaactaataagctaggtcaaataatatattaagcggtactagcttatatagatagtagaaatttctatctagtaaaggaaaggggcttagaatactatatatactagtggagacctatataccgagaacagatggtataagctttaaaacctgagactcagataaatttagttagggtatatttagttagggctattagactagtaactagtaccctactcctagtaggctcttattattataaagcctcctatcctactcactgctatagtccttctcttcgtttctactttcttatttatagtattcgtaaacagctatctataataccgatatccaagtatcctaaggtaccctctccgcctctactaagagatatactatatacctcttatacttataacaaccttatagggtagaagagtatatatatccttcgaatcggaagggaaatataccacaatatctagaggtatcttccctattactagaataatatctataatatatagatatatagaactatcgctagtattatatatatatactttataaagtaggttaccttagctcacaactaaacttaaagctaatatatattctctagtatactcctagctatagcgtatacactagatatataccggagaactaggcagttttatagtattaacgaagcgctcttcttatctaccctagcggtaatagtattcagtatccttatagtacaacctcttactatcgttagtattacagggttaatttctttatttaactatactatatataatattataaagatctataaaccctctatataccccgaatttatatattaggtaggtatatagggcgctatattctattagattattactttatacaatatatatgactatatacactacgctacagatttcttaagcaaaacgttcggtttttatatcggaaccatctatatcagtaagttatacttccgaaaactaccttcttaatattaagaagaataatacctaactctaaggctaggtaagggtatagaggaacttatcagcgagttcactagtaaggggtataccgctaggtttataagttatataatcgtaatactatatttcctaataatctatagcctagagaccattaggtcgagtactatctagaggcctacttttcaggatttactagcagattatatatatatagtatatagagtctaattatactaggctactatttagaatcacttacactctttcttatcttttctatatagattagaacaattttctggataggattttcgtatatcctaggtcctctcaaagttatagatatatcctatattcctattagtaaagccttttacctaatatagccgcaaggctagctaatttacttttaggaactagacactaaatagatttttatagcgctactatttagatttctgattatattacttttctattataattatatataagaccctatctagggaatagagtcttactcctagctataacgctaactttatagctagaacgtcagtagcctaacggtataagtacagcaattcctactaaagaagcctactaggttctattaggacttttttcttcttagatataccacctttattttaggtattattagtatccctttccctaacggattggttctataggtataaaagctaattcaagtcttcgaccctataccgaaattattaataacctatactaggcacctatatatatagattctttaatagtatataaaacagatatctatattatactaactaaggaaggaaagggcgccgagatccactgtataatagttaaggcaactacggtagtagaataatatatatcgcatttcgttatagggctagctattattaatactataacaggccccctcctaatcatcctctatactatacctacagcggtattcgtaggaatattttttattataggatagggttctattagatctagcggtattatatagaaagcgatttacttaatactagaggaccgttttatataatataataaacctcttctaagggtacagaaccgtaaggtcctactatagattatatatcagctcattagaattacagcctatattactatctctaagacaattactactattagtatcctctttcctcccgtctagctttactaaagcgaataactgatttctatttttaggttttcctatattaataatcgctttaatcctattctaggtatagattattcctaaatggttttctagggataaaataggggtactagatgatataacggctaataataaagctattctagctagtcttagtagatcacctaaattccctagaaaggagcgtctttaggactataggactaagcgtcagtacttagagtagaagaagggaattagtagataataagccagcagtttatatcgttaaggtaggtcaatttccctaggaactaaggactcgctaaactttatatatattaaaggacttccctaacggatattaatattattatagtgctctaagtaggccaagtttattacaaagattctaagtacactaagctcttcgctctaacttttatatcctatttatataataaaagcacatcattttatattattatagcttacctttatttaaatatagtaacttaatttaaataataaagtaccgattagcttatattagtactaaaggtatacgaaaccttatggttaaggtatactaagagggtaagtacaagtattaatagttataggaaaaagaatagtagaggaaactagtccttataactctaatagtagaattattatagaccgaagtaatattaagcagtaatttcggataaatatatagatagctgatattagatcttactctagcctcctctgtaaaagtagattagaccgctaagcaattaatcaatatctgcgctttattataggagaccattttatactaacctttaattaagttgtataatcgggtatcctttagtccttctataacactgtcgctaatagtttatagaatcttattcttaataataacatttatttatatatcccaataatgcctaggagagctatactctattaaatatatgataaatagtatattattacaattatcggtcacttttatctctatatcgctttacttaataactgatattataaacgaaccgccgggctactcctacttttataccttacttaataaaaaattctaggtcttagtcttcgaaaatttgcttaagatcaagacagctttcgagtgctatatcacatactttctatatattctccttaaaggcttcgctacttacctataactagtactagatagtatagttatttacagtaatatcaagaagcctaaggataataatagaattaatatagctaggcgttaaaagtataatatcattactagtaggtatagatattaatacttaagattgagctaggaagatattaatatttattataaggtatatcgatctaattataggattatctaggcttttcttccatcttttaagccactggttctcctcagtataaagctatttataaagactattcagaacgttattataggtctcgattactcctccttaatctatatatttaacgagagtttttatataatataatcgtaatttatagtgttttcttctataatcctactagcagtattactaatataccctataattctataagatcgcgcagactttctatacaaaaccatagaactataaatatagatctttttctatattatagtaattagataaattaataataaatagaaacttgactaataacttaatattactaatacagttttatacctatataatcgattagatcctctttaggaggtaagatagggaaggtaaggccaagtaaccagcttatagttaagtaactaaaattaactctacctattactatatagataccttcgcttttagatatcagcctatctatagattatacaaataagcttaatccttacttttatacttgatttcactttaaataagggtttcttctcacatttttcaggatacttagcttattagttagatatatcacaatatataccgtacccttataatacttctacattctatatatagctatatccttctacctaatatatctataccgctctatacctactattactatagcctaggttagccagaggagtacactacattccctaatcaccccccttaagcttgtgcgtatagaatcgaataaagagactaacgctaactaggctaataatagtattcaaaagaatcgcctagacactagtgtagaaacctttatcactaatatacagagtttcgttatatctaatttcaattattaggagcctaatctcaccgcgtactattatagtagatcctaaaagtattacagctagctaggcccgtttctatatcttccccttctcctaatcgctttatttaatacttaggatctttttcttaacttttagtttcccctatattttatactcttcgtatgactctttataggattttacccctaaagtaagttactatataggtacctagattctaacgataaactatttattattttagttcgattacttaggaacaacttttaaatatattagtatacctttataaacgttattaggagggtaaaaacaattcctttctaaatatattccttggtccatagctctaaaaacggaattgtaaatctaatacttaagaagaataatagttccattaaatactactagggccctaacaagtatttcttaaaggtataaataaaagtagggcttttatctaccttacgcttaccctcctcgcggcttagaataacaaatggtcccttagggtacttactcagtatatatataagaaatatacctactaggaaggtactaaataagacagatatactagtaaagctagcgatagttataaaagccgaaagaataagggttataaggataatattagagatatagtcgtagcgtataaagcgatattcaatgaactttcggaaaaatggtataaagacccattttgtaacaataggtattacagcagctatacctatcgataccactattagacacctaataagccatcctaaattaatactatcgctacttcctaaaagtttacctaaatctctaattatactatagatagttagcttaataagtttattataccttatctcatttcagataagtattataccttaatataacaagtcctataatattattaataacagccgcgcttactaaaactgaccctactcgagtctcagtaaggttaactaaataggacatagagctgatcacagtaaaggtagtccctaaatattttttagtaatagttaaactaacgcttctagggggatagtttaccaagtaaagtagtagaaagagatatactaataataaaggtctcaactatacctagtctatattaactgataactaaaaatttagggtaaataaaaccaactatatctaaaaccaagaaagagcaaaaggtatgaaatactaataggaaataaaaccctagttacagcgctaattatacttaaagtaaagttctacttaagtaagtctacacaggtactaagaccgcctagaataaatgacatcagtgtcctaagaagctaagaagccaagtagcgaagcagctataataaaaattttcacttaccttcgaaaataatcaaaattagcccaatatatcctaggctaacaaaagtctcttactagtgatattaaagaatattagctaagggtactctgtagataataccgataacgatttaacctataattccagcctagattgcggtcgcggagacctaccttataagggaaaggaagaagaagaaagaaacgagaataaggattttaataactgtaaatatagattagtgaggaaatgagcatagatcaatcggcatataattaggtatatacttcctggttcgtggtataggaggaaactaccggctatactcgagtttcgtctttagagtaagatttaataagattaaataagaaaattggagaagggctgttagaagtaaactaaggacctcctcctacgtgacacaaattcgtgtccacctgttcccacggttccatctgacgccgaccttttgccccaatcttgtcctagtccgctcggtcataggcctttcttattttggatgtggggttacgtggggccgcgaggttctattctgaataggttgcccggtgatctgacccgtagttctataatttgatgagggggttaggcttttcggttactgtttgatcgattgtggacgtccacctggctaagggaccaatatgttactgttcctcgtgggccataggcttctaagaaaccgagcagctcactcgcgtcctctgtgaagcgaggctaaatgtggttaccgccctattttggttggtagcggttgaagtctccggttgtccttctttcatcccggatggtggattggattgcgccccgggcagttgtcagcgctgatcctgttgatgcctcgtgcggggtgtgtagtggcacttgttggcggtagactgatcagaggagaatcagagagtagctgaagcgctggctaacaattaacgatcttttcatggcggagtggactccggggaaacgattcggacttttgattttcctcgcgttgctcataaagatgaacaatcacattatgtatacctgtagttaccgactgtacctatgcgaaagagttcggaggtatagctgatttcgaaaagtactgtacctatgcgtcctatgggactgccctgatctgcgggagttgcggcgggaattacgggagaaagtcggcgacgcgtttaataacgtgtcgagcttgctagggggttctcaagaagaaaggagaggtcagatatatcatgcctcgcgagccaagacggtggatgctgtattggacttcgcggaggcatcacaaagattccgcagtcgcgcgccacgagggcagcttgacaacgtgaacggcaattaggccacgaaaggccttggcgaggctctaagttcgttccaggaagtggtacacttcgcttgtaggtacaaggatatatagtcgtgataattcctatgcacgctcttggtcgctcctaggaatcaggcttatcgttcctagaggacttatagctcccaggagtgggtggtatcgctcccgggaacgaggagggggttttccgagctttagtgcgttaagtaagatcggtgccggtggatcacgaatcccgggagcatgagggcttcctgtgagggtctcacgtatacgtagatgaggactgtgtttcgtaaatggataatcaatattaagaaaagctatagtcgactctagatacaagacgtagcgcgaggaagcaaaagaaaggtagcttcctcgcgttcaggggaacccatatacaccatgtgggtcccgcgcagatcatttctccatgcttcatgtatatctctgacacttcccggaattaacaaataattcttggaatgtatgaacttcattggatcgcacatcttgaagattaatctattaggagtgaaggctcccgagttgacacaaggccaagtactggcaatggatttactccgccatggaaagaggaaagtatgctttcttggattaagccaatttaggaaatgttacacttccgaacttggaaggacttaaagtgaactgtgagagcagagagctctagactagaaaaggaggttctagttgagaagagattctggaaaaagtggattgcgagagcagagagctctagactagaaaaggaggttctagttgaaaagagattctggaaaaagtggattgcagagagcgattgctctatcgatatttctcaacccatttctacttttcactcagaacaatgcctgagctgtgtttcccaagcatgtagctcttccaacccgccttttctagatcgatatctgcgtctccagacataaacttcatgaaaacaccatgtgttacaaccacgatatgtttcctaggttcattgttcaattgatcggatatttctgcgacacgagatctcactctcttcgcccgctcctttactgcctcatcttcaggggcataaattccctccttcaattgccagccttccggtaaatctttgacgcctagtcccggaaaagccttcactagggccggacatgtggatccagtatcacagggaagcgcacttcgttcctgcaaatctggatccaagataagggtcgcaccattttcgataccatggccagagtctaggtcgaaatagcgtttatcgaggacgtgtgggaaagcagtgagcgtggtttggatggcacgccgcagtggagaagtgaggattatgcccacctgtggagcatgaggaaacgtttgggtgagccgtgaggcttgttcaaagccaagaggtgttaggccagggtcaagttgggagaagtctttggaaacattgtgggtagattccgcgtgacggacaagatggacttccgaagtcatagctagagaacttggaattagtagtgatctgtttgcaaatcctccctttataatagttatagcaacttaatgaaacaatttctagagtatattgcgtgattcttcctcgttccttgagtggtcattattataaccataaaaagtatatccgtatctcgatgttctaggctagagatattagtaactgccggtgtaggtccgaagtctatcttaaggcccacttcattacttcgataatagcgtctcgtaaatctaaaggggttggtagttatagtagctacttaggacatgaatccatcctttctttctgcttctcctatgacagtcatttaaaagtagtgccagtacattggtctaagggttgaagctgctacgtgacataaagccacggctatttatcggctgaaaatcgggggagtctatcccgacggatccatccctctttattagtatattgaagaaaatggtagtttcacaaattgacccgtcgctttgcaccatatcacacataggctgaataacgttggctaccagaatatgctatcgtcccactactccataccagcataaccctaagatagcacccattacaatcgccacgggtggggcaacattgaaccatgcgctccccgaatatgttactgccgcaacaaccacccaccatggttccttacccagactctgtccgtcgcttctttcagaagtcaggtatccaatctcccacaaccggtatacagctgtatatactagcccaactgcagtggcattcactcctctgaggaagtcgaccacatacttcttcttccgcaacacgcgccagaagctttggattgcaacggccagcgtgattcccggaaggaagattcctaaaccgccgaggaacgcaccgaaggcggtcgggaattgcgagcgctgtagtgctagtgctcccaaaaagacagcgaagttgaagttaggaccggggaaggcttgaataatggcaaggccgatcaggaagtctctactagagacccacccgggatcgacgacataggagcgtaagaggggaatgacgacaggacctccaccaaagataacagtgccggcaaggtacatattggcgaagaggtctaggaccaatgggggtgtggtgatctggcctctggcaacaagaattgcgatgaaggacgctaactatattagtgttgacgcttagggatcttgtcagaatggggtgcgcaccgaaaaagagaaacataatcagaagtccaatccgaatccgaataatgtgctgttgtgtgtcagcttcaacggacggcattgggcttgtagtatcaactgtgctctgtggtagttcctcgactctaggatccgtccttcgcgatcgtgtcgtctcactcctttggactctattctctcccagagttgtatcatccatggctatggagttcccatttgccttatacggttcctggggacgatgatgtctgtccttccacgcgagttttgctctcaaaaattgctgatacaaccatccatcccagatgctggtgaggaaaccaccgataaccatcagcacgggaaaataccagagtgcattgtaacagagaccagcacatgcgccaaagatcacgaggatacgggacagtttatcgcgaatagctttttcggacaactgtacagccgcaagtgcaacgatacccactgtagaggcattgaggccagaaagtaaggagtaggcaggttcgggaagagtttcactcatgttttgcaccccaagtgagagggcatacatgccaactgcgccaggaagactgaaaccgttagttgaagtctacagatggcgggcattgcagcataagggtatgaattaatcacctccaaagtagaaacacaagcatggcaggaataaatcctgcgtgtaatagggctaggcaaaaaaccatcttcgtgctaccgggacccggaagaccctgacagatagcaaagagttcctgatactatgaaatttgttaggaggccctatgacatcgggacacgccaacttgaagataagggagattcatacagtctgttcatctacccatttttccttgtcgccctttccctccacgaacctgctgtgtagaatctggaagtgtactggtggtcctccgaaggctgtaaagcctagatcccatgtacgcagaaaaacgtccaacagacggctcggcaggggctttcccgatcccccattttcacttgaaacccggcttccccgtttgtgattcagacgagagagggaagagaggcctcgggaaaagggggcgaggagtggcatactgctccttaacagctgcgaagatagatcgctcaagcacaaatagtaagatagacaaggaggatgagactctcaaacgtgagcagtgctcctataaaccatcgccgtgcgttctaggtcaaatacctatgtagatacgcgggatccatgaatggaatggatgggacgtcagggagccaagatgtttaggtaagctccagcattgcactaaagtcaaaacaaacaaccaatcaaagacaggcaatgaagcacgtgctgtaccaaaatatgggtctagaaaccctattcggaaggggaatgtcactgcatggcgtttacttgacggaggcgatgccaagcaatggaaagagctttcttggtagtcatccgagttagcggagtcaaaatcaagttaaagcgtctctgaatgtggcaagttgatatgtttatcatttgtttatgcagcctggtcaccaactcttggcaagtcccacagggtaggcccctggggtggcccctgccctaacaggtataattaggaatacaaattttagaacgcgggtaaaaagagcaggcaacagaaagaagagctgattaactgggcaaaaatatggtgcgaagacacagtttgaagagaggcaggatgttggtgaacgataaaatgtaacgttatttgggaaatgacgaagcatgcatcttaacaatgcgttctacgttatcggtagaataaacaaatatagacacctagtggcaagttacaagtggttaagccaacaagtacaaggattgtttggatatgatgcctggggaatctggcataaaagtgagcatgccataggcccacaggttttttctaggtaggtgggatgaaataattcttgcaacagagttggggggtgcctgagtattaggaaattcacttggtttagagtgaagagtgttccctagctaagcatactcaataaatacctccttctttcactacgtcgactcgtcttccagtactcctccttcagttataatgatcacgagcaccggtcgcctaaccgagtagaccgagaagcatgtggctacagtgcttattcgatcaagatccggatcttgaaggccgaacatgagctatgccgttacaccacaacggtagttggcggcaaagtaccacatgaccgttgagatcgcggaatcatggtatatcttgggattgatattgtcccgtgatcttttgattcgtgagattatcatcgtggacgaatcgtagtgtttcttatgatacaactggtctgacgggggcttgattcatgggaagacccttagagttgctgaaggatcgtgccatttcttacgacagcgatggccgtatctttttgcggttcgcaagagagtcagaactcgcggaaaccgtggtgttctctaggatctgccttttcgtgtaggttcccccgaagggtctaagattataaaacctgtggtttctcctatgatagagataatcagaggacccccgccttcgggagagaatcagagttcgcggaaaccgtagtttttcttacgacaaagagaatcagacgatcttttggtttatgagacataaggggcgcgtcaaccgcctaataaattggttcattattgtgcggcccatgcatggccggtttttatagaatcacccgagccacgacgaaaaccatgacctttccgcaacctctgtacgatactccgtactacggagtccgtagtggtgttatgcacgtgacttttctgacttgtagattgattggttattgatggcgagtttgtggcatttagcctcgcttctttagacagttgggagaaaacaagccaggccacggatcctttctccatagaacgtgatactgtagccaacgatgtagaaaaatgaatctgacaaatgaatacaatcagttcgagggatacagtataaatttcccgcgtaaagctaatggatcagaggaaccaatgtatgattggggggattgggtactctggtattcctttctccaccttggagtaacatggctgacgtcacttctccttgtgacttcataagttcgtgcttggtgcagcgacctctccgctcgcatcctaggggactaaatcaactcatagaagcttctggagcattggctgccatagtcgcagctgtataggccattttcgatcatgtacaactggaagcaacccaataaggactttgttgctttagggtggggaaaggagtaactaaaagccaattatatttctgctacaatgccattatttcattggtcagttgttactcctttctccaccttggggtaactgactctccagtcgtcgaaaaaagagcggggccgcagaaaaaaatatccagcttaacacaatactttttccctcttctcgtatttggtcaggccatgccatgcagatggataccccggttgaaagggccatcaagtataatgcacaaaaccggaccagtgggtatagtacccannnnnnnnnnnnnnnnnnnnnnnnnnnnnnnnnnnnnnnnnnnnnnnnnnnnnnnnnnnnnnnnnnnnnnnnnnnnnnnnnnnnnnnnngcaaaaaccgggaccagtgggtatagtacccactggtccgtttcagtcaagaagtttgcggcgtttgatcggagagtcctggcttcctctagtcttgctggactctctaatcttgctggactctctagccttgctggtctctttagtcatgctggtctctctagtctagccggaggtctagtcttgctggactccctagtaccttgcttgaaatatcatttgtgaaaataaaaaataaaataaaaagaaggccctaaaggccagaacctaagatagctacgctatgcagttaaccgaattttccaaaggagcattcattatttactgttggccctcaaaatcagaaattccctgttataaacagacctcgacttaatgcgttcctcggacaccattaattggttggaacgaactattggaacgaactaagctccctcccttccgtgctaggcttcaaaatgggcgtggcaataaatttggtaggcacattttacgttcatcacctactgcagtgaccgtttcagagttttgctggtcatgaactcgaatacccgcagtttctggaccgcggattcctcgatcgtccctggtcgtggttttcaacgcaaattcgttgcctgctgtgaactcatcactctgccgggggccgtttcaggtattcgttgaccatgaactctaaagaccacggttctggagcgcagcactccttttcaacgcgaaaacccatgaacatgaagagagccgtgttgtacctgtttgtagtcttaagaatccctgagagccattcgtctatacctgcgactatttagtgccctgtttccttgtcttttccaacagtgactcgtctcttcatatggcttccgctcctcccacccatgtgttttttccttaaaaagaaaaataggtgatgaaaaggaatcaaaaggatgaaaagaaaggccgcggtaattatcattttgagcgacacggttcttggtgtcgcaccaacacctcgcgtttcacgttacggaacctactccagtaagtccctactctccagtaagtccttactctcattcagcttcaaagttacatatctctcgcccagagacaacctaggataatcttcatcctaggaaataccacacttttgtggtttcttaagaaattctctatcctaagatcatctgtatcctactaaataccacacttttggaaaaccgtggtctgcctcaggaaacagattgtctggagaaatgaattagcctgggataacagaaccaaaaaaaaccgtggtctatctcaggaaacggcttgtctggagaaactagttggcctgggatattgaaaagacaggaaaaccgtggtatcaaagtttggccgcgatcttgtggtttcttaagaaaatttctatcctaagatcatctgcatcctacggaataccacacttttgtgattcattgagaagttgtgtacagacgcactcgaaatcagttcactgatttgttctctttgattgcttttcaaattctatttttattgacgctaggcctaatgtagccaaagaaaggttcattgcccttttcctattcgacagtcacgggtcggctaggccagatgtaggccgaagtggatctggccaagatttaagaagaatcaaatagaaaaaaaaaaaaaaaagatgaaactgatttcgagcggacctgtatcttcagcatcctgtagcaacccggatccaccctgtaccagcagaagtgagaaacagagttagggatactaaggcgtggttaacattaccttcaatatacattacttgtggttgtgtgccgagcgggagctaaccgcgtaccgatggtggacccacatacgggagggcccgaaccccctcccacaaacaccggagaaaaccccaccagcttctcagtcgaggacttccagcctcgcgtaccgatcgagccgcttcctgagtctcgcaaaagaacacggagcgatggtgccttcacaccagtggaaagtacaggccgggttaccaccagggaagtgtggaagctcatcgacagcctgaagttaatcatccaccaccaaactgcactcatcgaatccactaagaccgagatcgaggaggtcaaacacgaccagaatgtccttcgtgaccagaatgagaagctctacgaggaaatcagagctatgcgagctcaaatcgacgcactcccaccagcacctgcgtccagaacatgggcaacagttgcggccagcagcaacgttgcccctcctcaacaaaccgactcgcggccagacagggacctgaactgcgttcgtattagtacccaacgatcatttgtggatccagcggacaataataacagcgatagaaacaccttcggccgataccttcccacagattccgctaacagccacatccgcaccgcgctgatgaacgctccaacaactcaggacgcccaggtcgccgggattggcacaaccaagacaggctacgtgattcgatttaaggacaccgagtcggccgagctggcccgcaacaacaccgaatggttgaatgaactaggaaacaatacgaaaatggtgaaaccacgattcggcatcgtcgtgcatcgcaccccaacagagcatttcaatttagagagtgcaaacacccacgccattgagaaaatcatggacgaaaacagcctcacgggacagggcttccaaatcgaggaggtagcctggctcaaaaagaaggacaagatattagggaaattcgcatctcttggcatctggttcgactcagcggagggagctgaacgcatcctcaacaacagtcttttagtgggccagagatacattagtagtatggaacgccgcgagattaagaaaaagagatgcttccgataccaaagtttcggacacctagcgtggtcatgcaaagaaacaccacggtgcggacattgtgcgggccaacatgaacggcaacgatgcccaccgggcgtcagagcgaggtgcctagactgcagtggagaacatacaactagagaccgacagtgtgcgacccccgcatctttcaaaccccgtcacccccgtcaatgctagagacaaacctacaagtactacagttaaacattatgaaatcgggaccaagaatggaggccctcattaacgatcatcaaagccaaaacctagatatactcttgatccaggaaccgtccattaccacctaccgcacacacgtcaaccacagctcctggcgcctctaccgcccaacgaccgagaccgatacagcccgatttcgcagtctgatctatgtgaatcgtaatatctctacttcagcataccgacaaatcccatatgaccacccagatgtcgctgcgatcaagatctggacttctgactctcaaatactattcttctccgtttacatcccttctattcccttatatacagacagtaaggcttcagcagaacctacactcaccgcaattcaaaacacaatcacaacgactctacaagatgactaccgatcaacaagcatcgttctgggaggagacttcaatcgccaccacccaatgtggggcggcaactgtattcaatcacaatttatcgaagacgctagtgacctgatcgcgttctttcaagcaaacagtcttcacagctgcttgcctcggggaactgcaacctactggtcgcttagcgatccagggaggaactccaccactaaccaaacagtaacggatcggccagagctactagtcaaatatcacctttaccacgaaaactacagatcggaccaccgcgccacgtactccgaatggaatcttcaagcccacagcaagcgaaccccgcagacaaggaaagcttacgaacgtacggactagaacaagattggcgaagaattgatacagcgaaccggcccgtggaaagaaatcaaaactcaaccagcacttgacgaggccgtccaaaacctcacagaggccacaacggcaggtatcaataagtttacacctgacatacgcctgacaccgtactccaaacggtggtttacgccagatctgaaagtccaacaaaccaaagtcaaccaactacgtcgaagatggcaggaaaattgtagaatactcgggcgagatcatcctcactccacaactactttccaagagatacaacaaagccaacgagcgtggactcagacgattgagaaagccaaagcatcacattagaggcaatttctagacaaagccggagagggaaaactctggaaagcggccacctacatgaaaccaagggagacgtagggttgtatcccggcactaaaggtagacgaccaagagcttatcgagaacaaagacaaggcgcaggctttcctagattccttcttccctccaatggatacccccgaggccaactcaacaacaccggcaccactagggctcccatggcagcctctcaccaccccagagattgaacgatcgctccaagcagcaaaagggaccaccgcaccaggcaaagacaagttaccgatgcttatatagaagcacttataggtccacctgaaagataacattaccaggattttcaacgcatcactaagtctagggtaccacccgaaacaatggcggaacgcaaaaatcgtggtactacagaaacccgggaagccagactactcgctcccgggggcctaccgtccaatctcactcctcaacacactaggaaagcttctcgaagctgtgatagcccgaagactctcatacctcacagaaaaacataggctgctaccagacacccaatttagtggacggccaggaagaaccaccgaacaggccctgctggtactatcaaccgcaatcaaccgagcatggtacaaacacaaagtagtgactcttatctcctttgacctaaaaggagccttcaacggagttcaacaggcaagtctcaatacttgcttgcgagctagaggaatccccgccatagccagaaagtagatagcgagctttataagcgaccgatacgctagcataggatttaacgactaccgtaccggagtatcactgttagagaacgcgggactggcacaagggtcccccctctcccccatactcttcgcgttcttcaacaccgacttagtggaccaacccgtcacccgtcacagtggcgcctcagcatttatcgataactattttcgttagagagtgggccgctcagcagaggagaatctagcaaagattcaatccaaagacatcccccgcatcgaggcataggcgcgcaagactaggtcctacttcgcagcccagaagaccgagctcatccacctaaccagaaagaaagctaagcacctacagggtcaaatagtagtaaacggcacagcagtctcaccctctcccgtagccaagttactgggtgtgaacttcgactaggaaatacgatagaaagaacacgtgcagcaagcgattaagcgcgcaacgaaagtcactgttactctcagcgggttacgacatttgcgcccagatcaaatgcgacagctctaccaatcatacatcacgccagtgctggactacacatcaaccgtctggcacaacccattgagggacaaaactcaccttcgacacctcaacacagtgcagagaacctcactggtccgcatcctatcggcgttcagaactgtggccacagcaaccctagaagtagaagcgcacatccttcccactcacctccgtctccgccaccgagcacaacgcaccattgcaaacctccatacgctgccgcgggaacatccgatctgggatactctctcgcgagcccaaaaacgtagaaacaatatcgggtcgtacgctcgcttcccgctggcggaagcgctgaagaccatggacctccaaaggctcaacgagctagagacaatcgacccacagccactgccaccatggcgcctcgaccccttcgtggagatcgaagtcggttcagactgagaagtagcaggagagcaagctgaggccgtccgctcaacatcagacattgtcgtctactcagatgcctcaggacgcgatagccatttaggggccgctgtagtagcattaaacgtagatatagagatggttgagtcctaatatatccaggttagaccgatggaccgctggtcggtatatgtagcggagctaataggtatctatcacacagtcggcactatgttcaagatagcctaccagtaactaataccggaaggtcgataaactgcgacaattctttgtgatagtaggtctaccttataagtaattaagagcgtaagaaataagttaggataacggattgtttatacaatctactaagccgcgactaaggtcaaaatagtaggtattatactgcgcctctagtaggtactaggatattgtaataatcctagtaacgatactatagactaaatagtaaagtataccgctagccctagtaagtcctatcccttccgcctactacttataagggagaagggtttaatctatagtaatattaccacttagtaggagtataaatagagaatatctagtaaaggcggttatctatagaagattaataatactctaccggtaatatatactaggaagctatatagaagtctacctaggggccgggtatacctactaatacagctatatataggctataactagctatctacctactataagaagattagttataataataatgaccgttatagctatagtatataagaaacagttacttatatacttatagactgcctaatactagtagagctacgaagaaatctaaagagagaagtaggggatatatttaatagtatattaagtctactaggaggcttaaaataaagtaagaaaggtaaactaaatactatctcgcgagctaggatagtctaggctgtactagactttactaaggcgttatactggttttgcagttatatactataggggtagcctaataatagaaatagtaactaggctataagaggccttaacgaggctctaagttcgtttttaggaagtagattactttatatatatatatagagatatatattattatagtagcctatatatcgctttttattataagaggttagggtaaataaaatatatatatatatatatataccctatacctcctatcggtagcggtagtacagtggtaagtaccctgaaggcaacctataggataataaattggtcacttgttattctatagggcttaggttcaattcctaataccagtatatcaattactactattatatctctttggagagacctataacctaggggtagtggagtaccctagcctttttataggttaaagtggagacaatcataggccttactaggtaaggctcaaagttcaccgtttaggaagtttagaacaatctcagtggataaatcatcatatatttataaaaagtagtggtagcctacatatcgcttcattgcgaggggtcagggaaataaaacacatacacacacacacacacacaccctgtacctcccaggagccggtggaccgcttcctaggagcatcaaggttatgtcctgggagccctatagctactacgagtacgccatcacgatcccaggagcctgcaatactataccaagtggacgatcctatttcgacaatggcgccagcagtacatgaacatatttagaatgtgtttaaaaaaaagtattgtattcgagtgctcgagtaattgtgaccttcattcgttttgacacaactaattgcagcctggtttgaactaatggcactctgaatgctgttctgagtctcgctaactctcgggtaaactaacttccgaatagcccatggccagtaatgtatttgctgttttgttccaccgtcgacaaatgtttgacttgtctggatcaaagccattgccctggcttgatcctgaaaatatgcagggaactgtcaagaagataacaaggctcccagggacactgcagatggctctagggatagatccccggctctaggcatgaaattgcgagccctagcagcgttctctacaaggaccgaacaaaagaatcggcaaagggagatctattttccttttgtccgttctggccccagggctcggaatggcgcggagcgctgtccttgcaagcaggttagaaaaattttctgtcagagagctggggggtgcgagactaataggaaacgcacggacctatggtccagatggaaaatgtgtttttgttaaaccaatgccattctatcaatcctacttccagagagaggacgctgtttaaactagcaccttctcaccactacctgcgccctcatattttgaactgtagtctatattgctctctcaacatatccgtttcctatattcgttgaaatcacaatgagggctctttccagacccccttcgttcaatttcagtagaggcatgaccaaggaagaatcccaatggaggcttatcattgaggccaattggtcgaataaggcgccccctgccccctgttcaactagaaacatacagctcatttaccccgctcgttctgagtttcgccgctctttccccctgtgtcggagtaacgaggaacagtctcgcgtcggcccggttccgttcacggcccgggcgatcatcagcaccacacataagtttgtcagataagctatctccatgatggacaccaaggatcgaagggaaagtagtcacttttagtacatagttcatctactggctcattgcatttcaatggctgacactaaattgccagtcactgcacagatgacgtgttccggccgctttgcaggacagctcatacttgcatttccctgctcctccccactcccggctatatcagatgtagtcatgcctcctctctcgtttatctttcataaaattcttgtgatatctttagggatcacttcatagccagcaaagttacagtaatgccaagaaatggcaaagaagaaaacgaaacagcgtaaggccaatgagctgcctgggcgacccctcaccccagatatttctcccaagattgactatcaccggccttcatcatcgtgagtgttttgatagcattcaaatgacgttgtctaacctattcactggtgctacgaatcccctttggttaccctcattattgggagcaagcgatatggcattccggctcagttccttcggagtcaccaaaagttcgcccctatatttcttggtttatcagattttatcatgtctaatgttaataaagacatcgggcataccgtggtacatttcttatacacaggtggctacaagacagtcagttcacctcttggcgaaggcacatcagatctcgctagagagtacaagaggagcgttctagtctaccatgcgtcaaggacttagggccttactaatctagaagttcttgctcagcaaaagatgcagcatttagacgaggaacttccaattcttgaaatcttacgggtcgtgaggggggtgttctcaagcctccccccaggtaaagcctggcttccaggctacattcaaggaaatttgcagcatttacttaagccaaatgatccagggcttggtttacgtgagttttacgatattattggtcaagatcatgagtttaacaatgcggtgataaaaatggttcttgagatactatctcttcgcatatgttctatgaaagatcagcacggtaattcatcttcaacaaattaagtataaggttaccaagctgaaccagtcttcttgctacgtttttagtgaaaacaccgaatggcatcatctcaaataagtctcatctttcggggcttatccatgaagagcctgagcctgtcccagaggagcctgagcctgtccccgaagagcctaagcctgtccccgaagagcctgagcctgtccccgaagagcctgagcctgtccccgaagagactgagcctgttcccgaaggcctctctattgacagtgatggtagactttggacgattccccgagtgcctgctgaggttgatgactggccgcgcgcttcttcgttgcgcggagctacgccaaatgccgaaatactccaagaatctattgatcagggccacataacgaggatttcatgctcggacttgactttgtatgaaaattgggaaagtttgtcttcaaagagaagagctaaaagggctagcaagcttaggtctcgaggccttcctgttccaagcgagactggtttcatttctatagttgcagtttgagagcagcttcaacaaggcaattaaaccgtttacttcctattcatgaattcgtaaagtgccaaaaggatgtatattgatctataggcatagaggttggatttggggaaaattgggggtttttcgctttctagtttaatggagggcgacaacgatccctagcggctcgtacctctccgacgaccctcttatatgattggttcgatgttactcctttctccactttggagaggctcggtctccccagcaagtcaggacagaccagcgagtccgggtaggcaatggatgatagagggtgataactagacctaattgagctaataaagccgtctttctcaccgaaaaagagctgttcagacggaggtctatatcgtagggatcatcgtgatggctcctaccaaagatcttagggatcaggagttcaagggaacgtttacggagtacaaccatgatatcctatgaaatgtacctttgttttgcgccttttgcatcggcgaaacggtgacgatcaacagagacgccaacgagtgccccactgaagctagtgaatattctaccaataaaatattcagtcgagggaattttgtgacaggtatatttttttttcactccagaacatatccccgaattgtcaatctacaactacgccgttctgcggaaaaggaaaattgttctgccgaagtcatgattagctgacataagccaactataccgagccgatctgagagggtcccatcagctttattccctcatccaacaaataatctcatcaaaggcattcacttatcattaagcaacccttaggaatccacccaagccaaaatgacaaaattctctccaaaaaatcttcccgatgagtcgatgcgagagatgaactttctcgactcttccttcttcaaagagcccagcaaaagccttccgacaccagcgcaagtgagggctttgtcgaaagacatccacgcgaacccacagccgcagcctgttatttttgaagagtccaaagtcttcgtcaagtttggcccctatgtcacgatcgcagaagcgcagtgcctttggatgatcaaacgaacctttggtgacgaaattccagttcccgaagtttttgggtggcgggtcgacgaggagaactatgtgttcctctatatggagcttatccaaggacagacgctgcaggatggctggaatgagctcaatagccaggacaaaagctcgctctgcgatgagttatgtcaaatagtcaaccgtctgcgccgatttgaacaagatccttccgatcagtatattggtacgccccggtcaaaatgtgaaggttattatttacatctaatcgaatgtttccaggttccctggggcaccagcaactcctggattatgtttttcaatcatacccgaaaactgggcctttcttcaccatcaaggatttcaacgactggttttcctacttaccacaatcgtggcttcctccttcgaagaaatacaacgacccctataggtgtttgttaccggacagtggggtcattaaatttactcatggcgacctccaccgagggaacatcatcatctcttccagcaaaccagctcgaatcattgctatcgtggactgggcccaagcgggatggtatccagactactgggagtactgtaaggcactctacacttgttggtacgaggacgagtggcggcgagactgggtcgacaactttctaagtccacgcttacgagaatttgaggtcttcgcagagtacacaatggcaatgggctctgtgtgaaccagttctacctggaagtgaacgctactcaccgataggagaagtaagcatacttcgcagaaattacaaaacggcaggagaacgcacgtacgtacgtattataacaactggtcgcttggatctctgttctgaaatacttaaaatagaccattgaaaaaataaatataaaaacggatccaccttgatgttagcacaccacgagtgaggagccaaggtgtgggatcctctgcggtgaaaccgaataagccgagtagtttagcgagataaaatgtattggccagctatgtccttagataatcaaagggatatgcaacaaaagaacgtatgcgccaagctgcatctaacttcgccacaggccgtcttccgtcaactgctcgtacttaaagccaactcaggatgaattcaacgtcttccggcgggctgaagaccgattccatggtttgggggatcacgtttggattgaacaatctgaatcgcttccgctgtaatgagacttttcgagactaaatggcggacaaagtccatggtccattcctgacatcgcttattggtggtctgaagcagataaacaataagcacggaaaagtaagcattagtcaaattaggggacttacatcattgacaggtgccatgaagttctgactgatcccaggagtcgggacctgagacgcagcaatctcaatgttgcctctgggagttgagtctttggtcatcgctgtgtccacggagtcaacgatattggacgaataaacttggccaatcggaaaagtctcatggtgctgttgggtcatagcaggggagtagttccgtttgaactcgaggatgtagcccgccatgggtgcaccgacggcgtggatcagagtgcctcgtttagggtctgctgccgatggaacaaaaattgcaaagtgagctcgttgagatgaactattgcgaaaagagatgaggtgaatagttctggtggccatgatgttgtgaggtcctttttctttgcttgggtggagagggaacaatataatatggacatgagatgtagtaaaaatgcccaagaaaagaacaaggtctctcctcttatatctttcgatcatagcacgtcttaggaataattaggagtcccaagcaaccctaccaggcgcttcgaaggggagctaggcatcatcttcgtttcatatgcacgaataatattcgttctgagcgttatgttgattcccgagcgctgggattcatttttttttggcgccgcagagttggggcggcaatgctggaactttgagtcgtcggctatctttagatgaaaagtgctattgcaattcttgtggttgcttcggcgtttatcttggcaagtgattgaaggtagctgatacaaaactcgttggctaatctctggctttgtccaaattgggtgcctctatctaacaccaacaccctacactaaagcgggaaagcaaactaaatgaccaccattggccaaaagaaaagatgtcccagttgagcgactctttagtttggtactgagacggtaagttatcagattggggtaaaagtttattgagtaattaccgcatctttttcaagttaccgatgttgaatcagcttgcgcaatgtacccacaaaaatctggagcgttagtgaccgtgagaatgatccacacgagagaaatggcataaaataaaaggaccactagcggaaagcgtatggcgtcaatgaagtggataagaactttgcaaataaagcgcctccatctagtggcggctatgtgactgttcctattgcgccgagatgagtcaatcaaccacctcggcatacaaccacacaattgaatgatttgcccggaattttcaagacgaagatgaattggtacatgtggagtcagaagcgtttccatcgtgggtgttacgcttagatatctatcaccaaagaccaatagttggcattcatcatcctccgatttgaaacgggcgctaaagcaatcaatgaaaaaccactataccattcaaatttataataaaatcaacaagacccctgcttatccatgcgcaccgcgcgcgtaaatttgtttgagttattcgttttctgcttacatgtttgggcttcgtgggagcggagattgcctgatttcacgacgagattgttgtcgactcggataaccgtgcgaccgaacaacgaatgaagggtcgttctttcttgatcattcattgggttcattttcagaatatcggcgtattctgttgcatatcagaaattttgaaaattgagcagatctatgcggtaaaaagcgaatgaacggccggccggagaatttaagttcgaagcgctggcaggctggaagaggggaaattccatacgggaaaatgatgatccgacaaacgtccacccgtttcatcgtacgctcacaacggagtctcctgagcttcctttccaccataggtgacattatggcgaaaggccagcctcacatgcgggcgctccaaagcgacgcagggataacagatccccgtctgtcttgttggaatgaagagctaatcgatggttgtctagcactcaggcacaaatcctgggagcatgtcgctcgaagactaagaatagctgtgtacctttgtggatcatattagaaacgccgatactatagtagctaaggatcctgtcatttatacacatgtatgtaaaaagcagaggcgaccgggtttaagtaaaaccggtagaggcgcggttcatcacgtgaatcttcgcattgttttctcttattcctaccgcttttccggcgatcatgatgcccttttggattctaaaaagcatgggtttgttgtgctatatccctattcggatgtgaccgtctaatggatagaaaattgggttagatcaactgactccttcgcactatcattctcctcggagataaaatgtcctgtactttatcgcccaaggggtgcgaattaggtaaaaaccccactttgttaggcctaaaaatccaacgtcatattccgtgccccgcggttactttttaccacgctccaatttccctgcgaaagcgaacattcgatgccaaaggtgagttaggttgcaaaaatcgtttgctcatgtgctcatctaacttatttctagtggatgatttttcaccatctacattaggtcgtccactccatcctcacgcgtcccgcgagacctgatcggcctcctgttcggcatgactcaatcaatcatggatgagttggctacctttctcaaaagtgctagctggaaaaaggacaaggacaacctaaatgtttttttttgtgatgatgatggcctagagccgttgttagtgaaggcttccagcgagttgcctgattatcttcagcggcacgggtttcaagtgtggaaggtgttggaggaaactaagttcgtggaaaaggaggggattggaaagcaaggatacatcataccagtgacgattatctccggccaccctcgtttactatctgagccttcccagcctctgcttgttcccaataccccggcagtttttcaacgcgaacctgtcctatcaccagccttgtatcttattctcgctcttccaccgacttctacataacacaatgtgcggaattataaaatttgcagtattggctgagagttcgatcaactaaggtattgagatgggtcgcagggaaacattagagggtaatccgcgggagtgacggttcgttgttgatatggaaatagttgagggtaatctgcaggtatcgaggtggatgttgctgcgaaagcttgaggaaagtctgccggtgtaatcattgctatttggttgttcgtagcgctcattgggtcggaaaattgcttgtgaaaaatgagagtttatctttgacctgagggctaggaatggtgacttacaacttgaacatttcgctccatattgaattgggcactgttttccactgccgtatttccaaaatggggtatgagtgtttcacatgatcccgatttcgttggcatgtacacgggttcaagcccatgggtgtgaacttgtgacgtcataatgtccggccgattttgcaatgatatttgtgtgagcgaaggctcataatgtaagtcgctcacatcttgcaccatttccgaattctcttgaccactaaacatggcgttacatggtgatcccacagtggaagcaacctgtgtagcaactggtgctccagattgagaagacggggtccctgaattgatatgagaaaaagtcgccaacattttacaggacataccggcgctaggctgacgaatttgggggatatccgattgtggccaagtcctataagactgtcggttttcatccacaatatgggcatttgcctctgatagctgactctccatcactcgttctaatgaggctttgatcggccccagaacctttgcagcctcgtcctctgccaaggcatgaagaccacgtgtctgagcttcttctggcaatcctttctgcctcagatggttcaacatggcaattcttctaggcctcttcggcgatttgggcagctctttggtccagctacagcgttgtcagtgaagttacttctttctccattagattgccacttacatcgactcaccaccatcttgtggaaggagatacaatacccccagccctccaaggtcattagctagcagactgtatcgctctcctaggccaacccagtgtcttacgcgacgttcaatgtcggaaagtgagtcttcacagcccgaatctcttatcagatgggctatgaacattgaagcatcatcgtattggtactgggtacctggctgtacggcattcttcaagcgaaagaacgccacatagcaaatccggaggcggattttccccagttgctgttgattttcgcataagacgacgagtttgtagaaatcggcgagcggacagggttgcagcgaagttgggacatggcaagagaaaggcgcaatttgacgagtgcttgaagaaccatcgctgctcttttcgctgcttgttggtaagtacaaggggaaaagcgattcacgcttgtcctgcaggtcttggacgatttgtggagcttggagttgttgtgaggaacgcacgatggccttcttgatagcggactgacgagaagtttgtcggatacgctggggaatgtgcttgtatatgctttttgatgctttgacgttttcctgcttagatgaggattaaagcttcagataaatgatcgaaggaaactcacaatatctctccagaactcagactcgtctagttgatgttttccctcttctgcagccttattgcaagcagaaagaagactgtttgccaataatctgctttccacgatgcccatggtggttgctgaagttggaagtgaatagttgggacgacgtaagaattagtgggtacatgtggagtggtgggaggaggaaattgctggcagccgatcgaccgatcacaagatcgtactttttgccaggggaatgctgatcttacctcagcggtttggagtactacattcacaggcttgacccgattctgaataggttttctgcgcagaaaacctattcagaatcgggtcaagccccccacttcgtctcttgtcatcaccaacctgcactcatcctccaattgtcgccatgggtacatctaggcattttgaatcacttgcatggtatttggaacacactgctcttgatatgtctcttaaaacaaagaaagcagtatgtccagaacaaaaccgcttcgcgcctatcacgatggatctagtatcttatccccaaaaccaaaagagctgaatttacttcattcgacatcaattgccattctataattcaatttcatttggcctcgatttcaagaaaaaaagatttaccaccccttactcaaatacagacggttaaatgcatgggcttaccaaacagcctccttcccttcaacatttgcaggtccgacctcaggtatgctcgactttgagaccatctgatccaactatgaagacatgtgagtctggctccagaacttccagatcagcttttcaactaggagtacatgacacgaatgaccatacctacattttggggcatacataaaaagagacaattgcttcacacttggccaaatttctatatttacctaccaccaagactccaaaactgagaatatgacatgttcaaaatttcgatatttgctttcaaagtacatgtcccgcctcttctccccaggcagctcgcgcgagacagacttattcggggggccagaccccaatcgaagaagtatgcatgaatctgcgaaaggcgccaagcctttgacggtgaaagaacaacctgctttttctgcccctccaggctctggactttttgccaaagactcaataccgattcgcttgcatgtaagtttcccttttctccgggttaataccgagctctaaccaaacaagaccgtgcgaatttggtttcctcgcaatggagttcaacttatggaagatatcaaaagaaagggcctcggagatgtggttcttgatgccatcgctcttcatgatattggcgtccagcaccaagcccgggatggccatgacaacatgaaggatgcatatttattggaccttgcggtgctggagacgggtatatcacgggtttgggggaaatatgggattccagaattcattcctttgagcagcgatgatccaatcattttgcaacaaccagtcgaagaccttgactcgaaaaaagctctttgttaccagcgtctacattcaaaatgcttacgggagtatgaaaaaaggcagcagctcgcagaagctttgggatatgtgatgcaagggaacttaagggactggtatgatggctatctccaagacattggtggccgtctgaaaaagcttggataccgttgattaaatacatataaatcccttcatgctatgcaatttctctgatcaccagataggctcaattcaggacaagcaaaaagtcgaagttcgaaggggccgtctcacgcataatgcttgagtagcgaccttggagtattctcctcacttcattgtcgtgaggctgcctcaagaaagcaatcaagccccgcgacgcttcagaagacgaagcatcaaaatgccaggtcatcagtgctagcattagaacagtactgtaactgagaccgtggcgatgcaagggaccttaagggactggtatgatggctatctccaagacattggtaaccgtctgaaagagcttggataccgttgattaaatacatataaacccattcatgctatgcaatttctctgatcaccagatagactcaattcaggacaagcaaaaagtcgaagttcgaaggggccgtctcacgcataatgcttgagtatcgaccttggagtattctcctcacttcattatcgtaaggttgtctcaagaaagcaatcaagccccacgacgcttcagaagacgaagcatcgaaatgccaggtcatcagtactagcattagaacagtactataactgagactgtgcaaaacattcccctcgaaggcgcgcaagccttcctcaagagaaatgttctcatccagatacgtttcccgagacctgctgttcctcaaagccttgcaggcgtctagcagcattctagcatcttggctggagttttcggaaggtgtccatttcaagagtaccggggaatcaattctcaaaaagatcattgcctctagagcgacttttgccggtccatacaagaattggacaggaatcggggcaggcttatgatgtgagtatatcatcgccacgggtcaaaggcacggatactcaccatgactaaatcttttttttcaatcaaaatttatgatagatagcttccttcgacagtagaaaggagtctttatatgaccacctggatgtgttaaaagaacaccagcccatgcttaaagccttccgttcctattgatgattttaccatacttatcgaaagtcaaagctgtacgtcaatttggcctcatgtcttgcctttctgctgtctccttgcgattgtttcttccaaattggatagagtctatttggagaccagaagacgagcaagaaacagaccagggcctagagccaacgatcctaaatgctgccagcccgtacaagcgaactgaacacgcggtatatgggctggaacatgaaaagtctgcatctagccccgaaaggtctctaccagtatgtctccaaaagcaaatagagactagaagagctctacgcatcggtccatctggaaatcgtcctagtgagttttctcgtgacgcgcagggcccttgatattgccttctcactcttcatccctcagaaaacagattcccaaacacctctatgcaatcagattgcaactcggacagagaaattattgagctccctcacattcctccgaacattagacttgtcaaaggcagaattattgacgtggtaacggggaacagtggttttccgaaagtccaatcacatatttgataaaaggctatccttgaagatggtgccaaatgtaagtcaaatgaccaagcctccacaagattcactctcgttttacttcattctcacgctggttgacttttgatgtttgatggcttctaggcatttacatattggccgaactgaaggaatttcggatggtttgcggcaaagttctccaggccaaaaaggttttatctgattcaagtttcatagtgctctctcgagttgccgctttccagctaagagtaaaattccccagtcgggtaaacttatgaaaacaagtggtataatccttggagcttatgtttgggaatatggagagcctggaagatacagatattgaaagccaagaaatagttcaatatcgacagaaatatctttagataacatcgaggttgggatacaattgcgtggctaaaaaaagcgtccaggaagcaccaaaaacgtatagcaatgtacaagatgaaatagctgacaaatcggtaatttttgcacataaatttctgctagctactctctggctttgctaattttatggatcccaatcccagtgagtaatatgaaggagtaaaaagcaatgaaatgcgaatgtgtcggattgattggttgtaacactgcgaaaattcatacagtgcgtctgaggtttcacacctagcctagagaaataggctcttcgtagagtaaagttcaactttttgcatgtcctttatcataaaagcaatccaacagtggccctatggttagtttgctatataaaaagctctcatcgctaccaaatgctttcaatcacatctaaagacccaaaatcaactttcattatttccctacctaaagatgaatccttcatcttcagccatttgctcgcccttcgctctccaaaacataatcaaagttcggtatagtgttatacagatgattttaatactaaactatcttttcattgcatcttcaaccctcgaggatgaagctgagcttcggcgcgtcatcacaaggggagaaaagcaatgggaggctggctttgtgcctgggagctttaatcatatgcaagtgaagggttggtggatgaaagctcgaaaccttctcacagaagcgggatgccttcgtgcgttctcagtggaggatttgaaagcccacctcggatatatgctcttcatccttggcgaagtttcacttcaatcgtcttgctccgggttcatgctatggcggcggcaaaatccttctaaaagaccgtttgggagtagagcaagtatagctctcatttgctacagcttttcgggaataaccaatatcagtgactatcaatcggtcgatccatggttatttgacatgggctttgttaatgatatgctccgccgtcttcaaaagtcacccttattcgatgacaacattcggttagacgaactcaaaattgtgctcacaaaccttgaagcgattttgtctatggaagatgagcggtcagctttgattcaacctcatcccatcgacatcaacgatactattcaaatacaagcttattttgcgacagcatttcgtgcacttgaaccaagcatactattgcaaattttgccgaaatggagaaaagtttggattcgatccagaaaaaacagcaaagacgatttgccccgcctggtcatggaaccaatgacttacggtaggaagcaggacgtctttcattttcctgatgccgctttctgacattgacagatatgagagtgcaacatattgccaacatctttcaagaagtctcatccctgaatgcattagggcaagagacaaagcaggtgaagctgttagaaagatccaagcccgatagaatgatacttggtgagatatttcaaatcagaagcatccagcaaagatgcgagaatatgcacctaggttggccgacctgtaccgacgtaacatgacatgaactaacatggtgcagccgaaccagtggtagtccatattgtccaggtctcgccgaatccgtaaggtgttcgagccaacgcgctttaagacggcgggcatttgacaggaagagaagggatatctcgagtgaggctcagtctactattgagtccccatttacccatagtacaattgagaataaaggacctttgggtcatccgtttgactcttttcatcgaaataggggacgcagagacaaaaggctttgccctctcaaacttattgattggctccaagtaattcattactttactatccatgcttcataaatccccttttggcgctaaccgccgactgatgtaaaacctgggcatggacatgtaaattccaattccgagaagacaacgcaatgtcatcgccttcatcttcgggttgatcatctggcccctgtccattgactttgccgaattaattccagctgactaattcaccgcagctgagattcagagctacctcttaggtttcaagggtgaagctgaagtggctgttgaaaaggctgccgagtgggtaaatgagacaatgagggtagaactgtgcagtagtgaaatttgagagagctgcggttggccatcggttcgaacgaggggggtcatgccttgacaacagtgcgccagagctcggctgacggactggtccgatcagctttctgccagcaggtcccgtctccagaaattctgaagcctcacatttccggcagatttagtaacccaaagcggttagcgcttatctttatactagtcagagtagcgcctttccgaatcagtttttagtaatactgcagagttcctactattattcctataatactaacttatatgccactttttaaggactatagtcttcttattagaaactacgatagtataggattagtgcttaaagctctaagagataggtatcctcgtatactctattaaagaggctcgtttacactactttatatatataatatatatcggatacctcgactttctacttatataaattatatttaaatatcctctattataattatatcttcaatttaatatataagtaagttaaatagattatcccttaagtttaaactaagggtagtatcttaagcttagaaagctatatagctttaggatataatataaataggagatttaggtaatttaataagaaataaagatttttataaagatctgtatttaattagaataatataatatataatatagcttaggttactagcttctagtcctttagtagataaaagtatacctagagatataaaaagttgaggtattttatagatatattagagttatcttctttaaatataagctatattactatcttaagtttagagagaggtagtttttattaaattagaatagtagtaaagtagaaagctaagaggaagcgatagcttaaagagtataagaaagcagagagaccgatatactaaagaaacctatataatatactattactaaagtaatactatagtaagaagagtatataaataaattactaatagtaagataatatattatattataagatatatactatttattccctttctttctatcttattctattagctatagtctaaacctatatttcctaatatagattagtagttcctatataactaaaaatagcggtagcctaatatctctcccttccctaatatctcctagttagagcttatacctactatataactagctatagaggaaaccttttagtctttaatagtagagaaaatctagaagctactagtaatatatagaattagtaactatagtaataagtctattaggtaatatatacttagtatttctaactttagtaagcccctaaactactattagaataactttctactaatatatataatctactaaataagatagtaggtaggaataatagatttactacctcttcctcctattcctataactagtctagcttctaaaataaagtatagctcttatcagttcctccctatacctaaaaaacgaagtagagtagaatatatagggctagatatactatcttataaaaagaaaaggaagaataaagttaagataaaagataagactactcttaaagtaatagtataagggataaataatactatactacctttaggaggtatactaactaattccctattaactaataaagtgaatatagtaataaacttacccttagttatagtacctttaactaacttatataactactaaggtagaaaagtactataaagtattattaaaaatatacttattaactatattaaacttaataatctacttagaagatatagatactatttaaagtaggtaattataataataaaggttaaagcgatttaaagttttataaataatattattaagttataataccctaatatagtctagttaattaagtaggagaatatattcttagtaagtaatagtatctagtcttaatttaataagactatatattaggaaattattaaaaaaggtactaagctccttaatctaaaggatttactaatatctaaaggcccttttaataaatttataatagttaagaaggttactactaagcgctttatataggaagtaggttatagacttagccttactaattaatagtagtactattttttttagaaataactattcgagatatagaatataggtattaataaaattctcttatattatataaaggaatttaactacttctataaaagctacttattagaatctagggcttctttagtagagatagtctagaactaggaagaaagatataccttctatattaaatagttagaagagtatataactaaggaaagtaagggtaattttataggaagactatagctaaactagctacttataatagatagacttagtattcctaaaaatatatagaatagtactattaacctatagttctctagtatagaggaaactatattctaattaagtagattatataagctattagctattatatttagtagattctttaatttatagttaaaggtagaaataatatagaataagtctatttttattactctttaacctaaaggtaatatctttcttatagtttacccctttattttagtctaaaaaggagatacccttaggttatttattagagtaatttagtactttttagaatatagtattatctatagtatacctagtcctaaagaaaacctttagctagactactctatagtaactagggtactaaaccttataaaggtattagttcctagaggtaactttaatatttatctttagtaagagcttattaatagatagagtaaaggatatcttatataaaaggtctcggttattactctttaggtaatttaactatttaaagaaattatttatactattctttaaaaagtataatatttcctatactaatcgctaacttatataaagtgtagttatataaaaagccgaagttcctaattcttattttttatttatatctagtatctagtttaatatattctaaaatactatttactagtattatctattattatagagtaaaggtatatatatttagcggctattatagttatactagttagtataaaaggtatctaaaatttagactactaaggatactttatattagcttagatataagacttttatatatcctaaggctaagttatactaataagttaatagatagtagggataaggaggggtatattttataagagggatagatatatattatcctagtcgatattatatagcctatctagtagtctaaataggttccgcctattaggtaagtaaatctttatatctattaagaactatctcttaaatagactagttattagatataagtactttagaactattactatagataactataataattattatccttacttttagagaatatactataaaataagtaggaaaagagaaggagaaagagattagggatatataaactaagggttataaaatgatttaactagggccctactaagttagattagatataaagaataacagctattataatatattaataaagtatatactatagttatactttaatagagtagctataacttagtagattaaatatttacttttttttttatacttataagactattctaaactatagctaactaggctaagtatagatttatattttagtctactttagaagttaacttttattataagggattagggtaactaaaatatataccttatacttctaataaagtataagagactatatactataagtatagtttaaatatataattaattaggttctttatagatactataaaaaaactatctctaataatatagcttaattcctatattataccagcctttttatagttagtattacctaaaataaacttagtttataataaagtctattagagtaagttatattagatataagtccttactattctaataataatatatttatagattatttatatttaaataagaaactctaagtagaatatatagaaatactaactacttttagcttattatatcctatattagtccctcttatttatagttaataataaagttagactattatagcttttcgctataaaattacttaaagaaagattttagaaacctctattactctatatccttaaataaactagtaagtaactaaagtaattatttatagacttaaaaataagtggtactataaaaggtaatttaggaaattagttaagctaaagtctagttaatataatataatcggcttctcttatactattatttagagtactattagtctaaattaggttactagaataataaagatatttttagggacctataataaacttatatattactttataagggttaatataaataaatactactactactactataataaacttaatagttaatatagtaatagctattaaataaatattatataattagaataaaataagtataagtaagatatataagtaaaaaatccctaatctctatttattacttactttataattactaataatagtaggataaaactctatagataagtataaggattacttttctaactaaattataaaggctatagctatcttttatctaaaaaagaggtactatttagttgcttattattataagtaataaacttctacctagagtaggtcgataacctctagggaataattaaactagttaatatttaactagctttatactctactattatataaagcttctataaactttataactaggttatctaagttaataggttataattactatcttttattagtaagatatatagaaatatagttagaatatttatatcttaagtaacctagttttagtaatttaggactatattatctcttaagaaaggaaaaggcttctaattattatctttaagattaattagattaaactctatcttatatctctactaagtatattagattaaaagctaaaagttagctactttttatataatcctctctatatttatatagattaaattatactaagtttctaagagtattttctatagatataataatatattatagactattatctaaacccttatttagagaagactctctttagtattaagactaagtaagagaagaatatatcggtaaaaactttccttcttagtattattcttagtaaggtaactaaggattctatagattttagaatctttaggtaaaatataattaggctaaaagatatttttataaatttcctttaaaagaatagctaaggttatagctaggtatatccctttagctttagggaagtttaagggtattatagggatatattactaagaaaacctagtattctctttttaaagcctttcttagataaatatatcttttaggataaataaataagtagataagttatagaaagggctagatatatatatacctttaagatcttttctataagatcctcctttaagatagtagttatcttatttagagtaaaaatctaaagatctaaaaagtttattaaactaggtaaaatatattagtatataaatatcgctaaatacctatatataacttatatcgagcttttattaagctctaattatagaatagtaaagctttcgatattttagagttagccttagcttatttataattctttatttagtatagctttcttagcttttaactcttctattttctactatattaataaaagcattattttaagacttaatctaatagtttttattttattaataatcttatctttctcttttaaattctattaaagtatactaatatctttagctaattaagaaactttactaagctctaataagtaggataacttaagattatctatctactactagagctcttatacttacttagagtatttagtaaaagattagtccttctatttaactaatatataaagtaaattaacttaactaagagcttctttttactttaccttttccctcttattagctataaatatctccttaatagtaacttactttctttcctttagattaaagatcttattttaggctttccttaactccttatttctagtaaaaacctatttatactaatagctaaattctttaattataactaatatagcttaggacttagggcttaaagctagtatattaatttacttaagaaagctctaaaggctatcgctattaaaggttaaaggtataatatactagcttatacttaaatagctttaaatactagaagaagatataataaaaagactttattaggctataagtatttataggtttactaatatataaaacgaatttttagtctaataagagggtcttctatatttataagtttctaaaagagctataaagagatactatatagctattttatagatatttagattatatctagagattgtaattaagtactatatataaataggtactttctaaatatataaagggaggtttataagccctattattataagtataatagaagtaatactagtttatatatataaaagtagggctagaatataatatattcttaaccctataggcttaatatatataagtaattatatatatatttcttatacctatatatagctatatatagcctagaatatagttaccttattagagtaagtctaattctactataagttaagatagttagaatatagagtaaagattatagtattagtataacttaggaaaaataagtttaagttctctattcttacctaaaatcttagaatagagcagaggtactagtaagtaggttaaaataatttttagttagtaagctagggatataaatagattataaaatatatagacctatactttagatagggaaggggcccttagtttactactatactttaactactactttatataccctcttaactagtaggtaaacttacagctagttattaaattataagttacttagaaatgtaagatagaaagaaaattcttagggaaaaaaaaatcaattcgtttatatcctatttaaattatataatacttaacctagacttagatcctaagtagataactatatataaattcttaggctaataaatatagttaaaagaaacctaaacggctatataaataatatgatttagatagcttacttaatcgaataagaataaggtctatagtggtaagaactaagggttaacagtaagtaaacttatagctgttaattaaataatcggttatcttaggaaaaatgcattccttttaaataaccgaaagtatttattaaatatcattaggtagatagcagtctctactctaaatcagtatatttcccctaatacctaggcaacccctaaggtctagagcaaaaaattaatttcactcaggttagagatatcctatataagtctagtaataagcctatttctactatattttctaggctttatataccttatcgatttatagtagttagtccttaaacctttacgaacacttcttatttatttatatacaggcttttctatactatacctctagaagctactttaactatactatacttaaattatatatactttaagctaactatataggctatctacttttccctattaggcctacgagtagttataaataacttatatataagaatatactgtaaactcttaagtatagagattctatagtactttagaactataagttattatactttatataccctcggggccttagtaatttctaatttatagcctaaaaatattatatataagatattaattacaaatattctggtctagtataagttgccctttagttatataactttatatatattattctagtatatctttatcgagctcctctagaccctagtctattactaatatagggaatagatagtaggaattcttaaaaggttagttatctttttattaaaggtatagttagaaatatactagttataagctaaggaatacctaaaatcccgaagtatctactaataagataaatacttagccggtttcttaaaggtatattcctatatagatatctatattatatatcttactatatttatacacttttttttattaagcttaatttataataaccttgtttttagtatatagactttttaatagattaagatcgattagaataggtaggtagtatagaagctatactaagagattccttaaagtactgctattagaaataactaaggagattagggaactaaatatatagattaagtagtttttagagattctagaaatctttaaatagctatagttttaaagaattaaaaactagtattactctctagaaaccgtggtttttagaattatagcctatatagacctaaaactatccttagtaagtttattaatatagctatatcgatatctactatactaaaaactggttaatttctctaaagtttaaggagctagttaataatattatagtaatatattaagctaaggcctagttatactagaaattcagtttagagctaaccgatatatatataaatattagaagaattagttaactataggtataaataagataactattatcttcttattactaaagaaaaataaatccttattttattatatgattttataactagtatctcttaaatttaggaaagatttaataaaacttctatacttagatttctaagctaatttatttacccttaatattttactagtatattcttactactcctagctattctttagtattttattaattattattttactattattaaaaatatataaaccctaccttccgatttattacctattaatattataactctataaacatttttttttctagtatatatattttatatataatcttaactcgtttagggagtaccagtatattcctaagaacactagtctatccctaggaatactaactctacctttaagaatactaactctatttctaggatcactaggacgtccctaggatcactagtatatccctaggaacactagtctatccctaagaatactaagtctacctttaggagtactaactctatctctaggaatataagtccatcccttagatcactactatatccctaggattacctctctattcctaagggaagttttatagataaataatcaatattaagagatataatagtcgactctagataaataatattatataaggaagtaaaaggaatatagcttccttatatttatagggaacctagttatatagtcccgcgtagattatatttctatctatcttatatatactatataatctagagagtatatactataatatatattatataggtaatctagtaataagtatataatatatatatatacccctatagtctatataggtactatttttttacctatactacctcagggtttatataagcgactagttatataactagacttaagagtctatagaatatcttagtaggcctactctctaataagtagatagctaaaaatttgccacagtaataaggtaaagataggtatacagtgatataatatcaggtattagcaatcggctaagaacaatcttataagaatagggtgaaaaattctcgctagtagatatagggggtggtagggtattagggaatatacagatattaaaataagtagagatagataagctaattaaatctaataaatactacctcccttttatactaaggtagtaatcgattaaacaaaatagtttcctcaaataagtaaaaacgttttttcgaggttattgtatataacagttattatatatctaatatacccgatttctatagtaatatttcttaaaagttatccgttttcttactctcctataataagagctcgaatactttaaatcggcctataacgctatcgataataagcagcctcttaattttctatcgctaccgtacttaattgcgtttatatatctttttttagtctaaatctagctagctgtttctttaattaaactacgatatattgagttagggagctatatttatcgctcctaggatcatgctcacagcctctaggagcttaatatcctctaggaactattatgataggtcgtggaagtgagacgctggattgttcctaggctctctaccttagatcctagagctatacccgtccgtttacaggagcgctgattacttcggggagcaattgttttactacccgcacttattacctgcgttttagatcctacttattattttgaagactcacactcctagggttatatccggccctagaatccgtagtatggctcctaggcacgcttttggtcgctcctaggagtcagactcataggtcccagaggacctacaactcctgggagtgaactggacagccttgggaactagagtgtgtcccctgggctatcgatgccagtggatcattggggtcacccgcacgttttacatttggtcctggacccttgggtaagaatcctgggatcacgaagtctccccagaattaaaaaatcattcccagaggtagggtatcagaaatagaggaatataaatctagatactaggaacaaccaggactaggaataatttatgtctttccaggaaattgcaaagaagttgttagagattgagtatatatggtagtataggtatttggttgctaaccaaacgctgtatcttcttagccagctagcgtagtggtataaccaaagcacccacaatccgttacagaaggtggcctatataggaatacctcggagagtagggactcactgtagggactaaggatcgagtggtaaagaagaaggaactcttacggatagtatctcgagtattagaccaggtagaggttgaaatagatcctaagcgatcataagatactccttttagatcctaaattggcctatatggcttatgataaaagcgtactgtagataagatacggatactagaagtggaaaaatgaaagaacatagacaaacgacaagttttaggtagcccattccaagagaaagaatggcttggaaggcagaaaataagagatttctttcgagagggcttagcttataagagaatcttcttaagaggaaatcagtcacagtaaggttagctaaagagcacagacgatatagaaagctatacgttatataaactggctcttcttcctacccctctcctagtccaaacattctaggtcttaactagtcttaagatggtctagagtcgatattatttagctagacgctatttagcgataaataattttactagcttatctagcttactgaaggagtaggttctacagtagcttttattagatattagtatatagggccttattaaagttatattagctgattagctaaggaacctaacctataaatagctataaaggaaagggagtataactacctatatttctaaaatatctacaatacacttagttagggagctatataatatatatcccttattcggctactaataagtgatagttatttaattagctaattattaagataattcataatactagaaagggtttaggtagacagcagctctataattattaattactagatttcagtagttcgaaaatctcttagtaaggtaagaataaaggatataagctagactctacgacccttatataggtagtctactccaggtcggtgattagcttctaataagaggactaattatactattttctattataataaaagtaaaatagatagtaatatatagtattaacgaagtctaggaatagtgaatacctacccttaagtaaatttcaaattatcaggggatataactgctcctcttcttaaaaatctcagatattatatacttagagatttatattctagtaatattaggaagtaatccgacttctagatatagggctaaagagtataaaagactaggtagaaccccttcccttaatatattcttagaaataaaatagtattacagctactatagggcttatttagcaggggcttggggctagatatataggcactccttaatccttttcgactatatccactagatattttatacttctttagtatacttataattagcttagagttattagaattagctctaggttatatttactataggaccgatttataattatatacttcggtagataactctttaagccttctatcttaagtcattaatattactatactagatctaattaaaactaggttttaccttttcctatattcttacttcctttatatatactaataatatatctatagtattactagtattgtagacgctcactagagcatttcgacttatactcttagcaaggtctatatatatatatagttcacttttttagacacaaagtagcacaatttagtaggggaattagctatttaggtattttatttagaggtacagtcggctgaaacagagaaatgtactttggtatactagtatcttttatacccaataactctgaaataaaaaaaataagtattttctagagcttaaatagataaaagagggtagattataccttagtcaacaagcttagataagtctatatttaatatttataaagaaattgcttacccttatacctattagaaaagaagaaggtattactaatagatttaatatccctatagatatactaaataaagtcgctaggcaatatttatatagttcggaggtaaggaagccttattagctagaagtcaaacctaagataagtaattaaaagaataggctaaatccgttaggccgactagattagctattagtaatctaaataagttaggctaaggaactgatataggaatatactaaggtattaatataactataggattctttataatatcgtttcctatatataaatctttattttaggagatctataaacctactacagagtactttaaggcctaataagatctaataatagtatctcctaacctctatagatcactatctaaattagatatatatcgagtgatatagaaccaatgttaaaagaaatctatagaattatatctagtcaggtcctaggcctagagaggagggtctgtatttagaaagctgtggccatacagcctttagtcctaggtcctgtgatctagtataattaactctagacctagtaccgacggctatagatacggatccatattagatatacgtctacagctactagtctaggtaggctttctatctattaactaacggctagtctagcttagtaaccataggggcccttaggcttctaactatagtctatataggttataagtattttaatctagatcttaattgcctccttatattatactaccggctctttattaatctatctattataattactatagagtaccgtttaactaaatctaccgcctctttacttataactagattattactgaatattataaatattatctagcgattttcgaaaataatttatccctcagagatatatactttacttactagcttatatctgagataacgctataccgaatatagctagcctataaactaaggctattaataagtctaataagagataagcttattttaggtataggccaataaagaaagaaagtatatatatctaaagggtaaactattttcaaaaatcgctgtatttatactatccttgatagctatattaaagtgggggcaaggcagattgtttctaagctctcttagatcctaaatcctactctctagtatatccctatagtagaatttaaaaatagattaccccttcgatatatatattttctctcttagtgccctaccctacttatactaaccctaatttgtttaggaaagccctactatctctttataaagtatttttagtagatcactaaggttactataactataggtcctagtactaagtagactaaagttactgaaatatcctatgccgatatatagtaagatagcaaaggttttaacgccctaataaaaggtcctataggcagtatgattcttaccaaataggagctaaattatagcgagcggtatacctattaaatagggcggtaaagattaggattataaaacttttaatatattactatcctagagttaaaaaaaaagatttaattactactctaataacccttacaattttctatactatagctatagaagactaacctagtagtactaatatagtaagtcctctacagctagataactatttagatatagacctcttaggctttaatcctatatatataagattaagtgaaaggctccttatattaatatatctatagtttaagtagaggagggtaatagcatttcaattatataggcttaataatactatagttacgaatctatttagtctctatataaaagagttatattatcgctgcctatatacacgtacttgtaacttttaaccttttatatatttagctactttctaagtcttacttatcgataactttttaagctttaaatactacttatacctatatcctattagtcgatagtctatatccagccgccactattatctatagtactctgtagctgagattttatcgattactatagagttattaagaatactcgccgttacttatattttatataataataagtagcttaaaactaaatttactaaagtggtatattaaatctttggttcttaattaggcttcttactaatctaatagaccttagataagaactatgaaattaaaggctagattataagtaaacctatagaaatattaggaaagctatactatactctgtagatcgttagacctagcgaaaatataagcgtagttattattaattctaactaagggaccggtcttataaagattatttataaggggtaggaatatacaactctctaaactaactcaaacagtaaggataaagcggttatgatttttttatagcctaggttctattatatccttataggtaatacttatataaagtatatagagggaggaaggatttaattgtaagaattaaagatttaagctactactataggtaaaggttttttctaatctacttttttttcttagggctagaacaaaaatcttattctctatatagtttacttagaatcttttaggtttagtttatggtatttatcgaagttagcttcttaataagagtaagtaactaattatatactatatagccgtataggggtttagtaacttagtctacttaatactaggaaccataattacggtaattttaataaactacctaaagtatgtctataaaggatagtaggggactttcctttatctaataaagttaagcgcgatctaaggggcgctaagaaagaaaaccttaagtatataaggggtaatctatttttaaattctactttactataattacagattctagtgtataggtagaaaattgcccttaagccatagactactttaccgcttagtaacctataataattctagctagcgactaagggatataggtggagacccctaggattcaactttatacctagcactttcttctatttaaactacctattaattaaattataagtctatatatagacgtatatactaaataataagtatatctataaattaactataaggtactattagtctatactatgctactgtttccttagttttatctaactttattactaattaagcgataattggtagtaaggataaggctcttggtttttaaatttaatattaatagtaggaagtataataatattattgtactatatccactttaattaagaagttatatcactataataaggaggagctctaagagttactaaggtctatccgaaatacagatagccttattaaggctatatagtaagcgttagatcttaagtactaataaacagctgagcggtactataagtcagagtactagaaaagactgggagataatcgttaaacctatacttaagaaccatatctatcaatttgttaataaagtacagagtaatagtactaagagtaagtatctaatattaattatagggtaggagggtaaaagggaattatcccttagtatagtatacttatctataagtaataattagttagagggattacaaattgagaaataaattatatatctagtaaaaatctgctttcgagtatagcctagggacaattttctaactaaatgccataacctataattacagtaaccttactaatctaccagaaatatattaagagaagctggtagggactttatcctactgaatcaagtttagtgtaagcagggtagggcgccgggagagaaagtatatatatctaaggggtagttatataatctattttcgaattctactatactctctagtaagtccctactctctggtatatccctactctccggtatatccctactctctggtatatccctactctctagtaagtccctactctctagtaagtccctactctccagtaagtccctactctctagtaagtccctactctctagtaagttccttgctaaatgctaaagcccaaaggacccactctagttccctagagctttacagttcgctcctaggagttataggtcccctaggaactattattctaacttctaggagcaaccaaaagtatgcctaggagccatgctatagatcctagagtcggatattatcctaggaacatgggtcttacaataagctaagcagggtctaaaacataggcaaccattatagacagtaaaatatttcctctagaagtaattaacgctcctataaatagataggtattcgcgctagagattagggacttactagagagtactaaaatatactaaaaaactagggtagggcaagataggtataataagggagctttttacttatatctgcacaaatcattatctagctaggcggtttaaagtatagcttttatataaactaagcctttaagggctaatatagttttcacttactctcaaatttattccctattaggtatagtaattataattataccgaagacttacaactttaaggttaattttaaattatttatagtcttaaagctactatagtcttagaactactaaattagtagtttaggaacctcggtagttttaaaaccatatataaataagaattaaaatctatatagtcttaaaactacagtagttctaaaacctttaactgatattaggctaataaattataatatactagcgaattgagtttaggggtaatctaatttgtaattaatatatactaggaagctgtatagaagcttagtatacctactaacgcagctatatataggctataattaactctttacctactgtaaaaacattagctatagcgataataattactttaactatagtatataagaagcagtagcctatatacttataggctgtctaactttagtagagctgtaaaggaagcttaatagggaaataggagatatatttaaagtatatcgagtctactaggatacttaaaataaggagagaaaggtaggctagatattatctcgcaggttaagacagtctaaattgtactagactcggctagagctatatagcttattcgcagccgcgtaccgtaagggcagtcgagtaataggaatagtaattaggctatagtaggtattaataaaactctgagtatattcttaggaaggtgattcttttatagtatcttataagtaagtaatataatatagagtacattttaagctactttacttacctagaattatctattgccccttattattctctatacagcttaagcgaatataattagcccccctattatattatatataatatatacccttctccccgtctaatcttaaccccttagtcctctatcgaattatatattggaattatacctatcctccctttactatcccttctatagagctaaatcctctaaatcctctacccctagtattaaccccccggtataatattactaagaccccgatacacgacttaagctatatatatacctagcctctacctagaagttcggtaaactccgattataagtttagtatattctttaaaagtaatagcggtactatggtaggtagcctaggtagatctattagagatattacagttatttcctctattctctaagaaactcttatattaagaactttctatagaattgtaagcaggttagataataataactagtaaactatatatagtatatataagtagaatatagctttagtaaatataatataaagtcactacttcttttgtcccttccccttatcctttcctctgatttataactctgtgtaactaagctctttcaacctatatataagactagataaatcatttatccctaggaattcccttaccgggtatataataaacgggtctaactaagcttctataagaataggtattatctatcccttatccttaatagagccctagtttataagccggaatttcaggcagtatattcctataaaatagatagatagattattaaagataaagaaagtagtaggctattaaagctttaatttattatagaggttcctagtactagagtaagaataattctctggtttcgagttataggataagggatagataggggcagagttagagttaggatctacgttaatatagaaaggggatataaatattttactagataggaggggtataaaaaatatatcatttgcacgagtaacactatcgcttcctatatttcgttctagttactagtattcttcgaattctggatcttataacccactagaggaatctaatactagaagtagtaagtagctaactgtaaattataggtcttttagaatatcacagttattcgataacttgaaattaaaatctaaaaggagaatttatactatcggagggaggttaataggttaatagccttaaatacctatactataggcttatacggcagtaggctactattaaatgtaaagatagtattctttctattaagattctcttctaagtaatagagtagataaaccggaatcttaatagagaagattctagaagctatataggatactgtgatttagattttgtagtcttattttctactaggtactagtgagtactatatgatttaataaggtacttagccctttcttaaaataaattaggctaggtattactgtagagctactactataacttatatatattagaattaaagtaaagtatcttagggtttaagtaaacgctaactagttatttagtagcctagtataaggagagctattagcaattaataatactacttaaagactactaaccgaataaagtaagatatttagtctagaagaaataaaaaagagtagactttacttaaaacttaggttatctatttatatagtctaaccgatatcttcgcggttatagcttaatattggactaggtattacttacctaaggtactcttataaactacagatagttagagtatagcgatacatttataaaggtaatactagagttataggttagctagtaatagaatagttattagataaaggtatataccttagattaataagcctttcttaaaaattccttattaatctaggattacctagccctaaaagtataggaattttatagcctataccggaagattgattttaaggcttatactaaaggtatagataagctattataggtattagaataagatattgtaagcataatactaggttagtattcgggtttttagatacagtaggcctatattactataggtaagttcttgatatttattctaggtaaaacgggctagtacctatatacaaattttgtacttaaatatatcactactaaaattaaaagggattaagcttaggtattagtaagtatataacttaggatatagctaactatatagagatagaagatattagctatagataaatacagcctatctagctctgtaggaaactaacttctaggtataggcgatagcagctatttatagaaagctttttttatctagatagtataagtagagacgttattttttctcccatctatatgataaaatcaatatataccggattttcttcttcccgacctctataggcagcctaattaatatagagactagggacaagtagggcagtgaactaaggaaagggccagagggataggccgagtaaagattatctatctaagagttagttaggcctatatgatttatatatacttcctaaaatcgtagttatcatatatactctttagttatttctcgaattttaaagtcgatataaactgatagcttatagataaggcgatctaaagactatctataatattaaaatttcagtaaaaagtgtatattatttagtaagcttttatattttttttcccccctagtattatcgagtatagtattaaggtatcaagtatattaaggttacaagtatatctaccttaaagtaagacttacaaagttttagtatccccctagacctaccactttaatacctactacttatagctataccgctatagacctataacctatagcgcgtcgcttatatcttatatttttacctatctaaaccccttaacccttatttttattttataggttactctttatttatttctagaatcctagtactaataaagataagaatattaatagtatatttctaaaatataaaacttcctatatcgcttattataaaatactaaactttagtagatatataacttatatccgatattatatatactatccttaatctttccacttttagcttttatcagagatatagtgaatctatataaggttttctagatatttacctagaatatcttataatattaatatcagacagcttatatcagagagtatattactttctattactatatctaacaaaattattaattttatagtttaagttatagatttcaatattactatctagaaggaacctatataagactagtcactgatttctatcagtttttaccataattaggttagtatccgacttatcatatttcgctatagataattaccccttatttctcttactattcaccttaatatcactagtatctaacacttaaatagaaataaaaagttatactttaagtatttcctattaatcgatttatttatatagttatgatctctagatacagtatttctctatctagacttatacaaccctcagatcaagtctatcgtaggaaatataacaaatttagtatatacctagatattcctataataagactaattattagattaggtctattgtaggaaacactataattttagtatacctagatattcctataataagactaatcgttagattaggtctatcgtaggaagtatcccgattttaatatatacctagatattcctacgaatagactaattattagattaggcctattgtaggaaataccacaattttagtcatctatagtctagatattaatatctaggccttttaagagaagaactctttaagggatttcgtgatctattataggaagtaaagtatcggacaattcctaactaaaggagctagtcggctagctctagctagtttatcctaggttacttaaagatcctacttaaggtttatcgatactaccacccttccttcccttttatcttaggtctagcgccaactaatctaatctagtatatattcagaatacacctaatactcgttagtataataattttgcggtctttttattcttaatctattaatttatactctcccaaaatccaggctatcttaataacttcttagtaaatatagtaaaagaagaatataccccttagtctccggtatatattagagatacagccggtttaataattaaaagagaaaggactatagataacctcttatattatacttttactaagaggggtagaacttattattttctaccctaaacgctagaaataggtaagggagagctttatagaatagcctaagttattattactacctaccttaactcgacctaattactttactattattctataatatttttctttaaatatcattagaatctaaggtactatttgtagccttttaaagtagaaaaacgatagttagggattaagattattacttagctagtttataagataatacaatagatatattctaagtaataagagataatagaagtaggaagattctcaaacgttactagtatattaaaacaacgatttacagctctcttataaagtaaaggctattatagagctatatagtactatcctccttaaaattagtttttataggagaattcgacagcttcttaagttataaattacctaccgagataatggttttcttataaagtagggaaaaggtagaatataaaggcgtttatatactctagacaaattcaaaatatacctataccaatcgatatcgcagttataataatcttaatatagataatcagaaagtctaataaatttctagaggtaactaatctagtattatagagaagttaaagtatagcggaactttccttttaagggaagggtaaagaggtaaaaaagggaagaaagggaagaaagcggagactacctatagaagtaataattagttactaagttaacggatatactactatttaattatatatagaaactgtaccggtatattactactaacctatcttaggtgattcgctaccgttcttttcctaaaataactcccttttattataaatatactaatactatctatctattctatttattttcgaactaccgtaaaccagtattatctagccttagcttcttttactatctactcttactattccttagtattatctcattcttgtagtataagctatagtaaatcattagatacctatcctaagacttatagtaagttagatcctaaagtgattcgtcttatagaaataagatctttaagtgttaatataatagcttatatactcctatcgctagttataatatcctcgaaatagttagttcgatttttactcgtttctttagatatttaattaaagaattttaaagattctttgatattattggcctcttcttagctattattttatttacctgttttattgtcctatagtagcgattctcggtaatataataattagggctatcctccttacttatagcgatattgcagtagccttagcctagaattaataagctctctctctatagaagttaaggcttataagaggattaactaaggtatattattataccctataggtaataatcctactttagaaatagttataacttaagttatcttttctagtaaagtagaccttatctactctatataagtagaaagttaatcatagatttcgaggccttactacgtgctttctctttcttcttctattatctgaatattaatagattcctctctagaggataataatactaatcttttcttaatagactatagataaatactaagattatatttagtgtcttcgataagttcgttatatttatcgataatattcttcgttattttagttaaattcctagaagagttaataagtactaagtaagaaagtaccccctcccccagcccttaatataagaaataagaagacgtatatatttatataggtaagggtaatattaattgtggatttatagcctaaaatcatagtctaaaagctaataatatcttcacctatatactacaattttgcctaatcacagatactaaatttattattagtcgaatactcggaataacttatgattaatatattaaaatcattatatactttataatatcgacctaagggtttttcaataattctactattaaggaagggagctatactaattaattcttagaggatatttagtactttattaaggtcctatagtatatctcggagatcctaaatagacttttctcgattataaaggctttaaataatactgaatagtattatacttaactagagtaccaaggaaactagtctaataaggcctaaagtaatactaataacctcagctatattatataagataaaagggagcgggggttaggttttaagagcaatagttaggtaatactaagtataggctatagatataaatagaaagagcgaggatataagtagtagttttaactgcctagttctagtaaaggtctaactgccctaaaatagctctttttagtataaattaagaaggtatatattaatagctagttattagacctactaacttatagattactctgttcctaccctataactaaaatagaaaatagatctctctagtaatagcctcttaataagttattaagaccttagtttattaactgctacctaaagtcgaatctttgccttaaatattctataaaccataagtaataggaaccaatattttgatatatctatagaggaactgcttactcctataataaggcgagaaaataaatatcgcaatatctttaaggatattgttatagagaagtatatattccaatttattagatctataaaggggtatataatgaccataagatcagttatagctaaggtatatactacccagtatctaggagatacgtctaaatctataatctagtaaattttaagggaccgtagtagaatcatagtaaagaaacaacctccttactactaataacagataaaaccttttaataggcccagtcatacagttatatagtaggtaagaaataataggtatactacctcaagattctatatctttactatagatattttgatcagaataatcttatagattaaaacgatataagggagggagggaggaagtaggtataaagaatagaggtagttattaggagagggctgacagaagagaagcggggtaaaagataatagatttataaagaatatataagaaaacatatctaagggctttattttagatagggctaaaagctctgctcctattactctagggttaaaagcccccgaaatttatcgaacggtattagtataatatctatagtaccgccgctctttatcacacttcttcttatagagcttatatatagtttatatagaaagaggttaatacctaagtagaggctatagcggagattctaaaatatatctaaaaacactcgaaattcctaactagattcgaaaagtacagctcctataggattaaggactcccgtaggactagacagatacagcttaccataaacgagccgcttttactattaatattatttagctatataacttaagaaatacgcgaaattttaaaagctcttattcagactattctaggggtcaaaactttagggttaatattagcctaaagttactatctgatttcggtttaaaggatagagatggatttgccttatcctatcctctattctttaataatacctgtggcgccgaagtcctactaatatatttttaagggatcggtttttagtttaacgaattactataaagggactatatataaagaagatctaagctaatatattaaaagctataatctctggtatcttaatttcttctaatatttactatactatatataacttatttattctaatacttaaaacgaatttataataccgctaatttaggtactaactagtttttactcttaaaaagcgaaagacaatatctaggttaaggtatagagtatcactatcgtttactcttaggtaggggtatagacgaaatattaggtacagaccgctttatcgttagcttaaagccttagctataacgatctttaaattctaataaaggctgctcttataagccttcgtcttatatagaataccctactgaaggtaagcctctataatcggtatttataaaattaaccctagttatatcccttaataactgttaaagcgatatattacttagatagcccctaacttacctagtcctctatcctagcctacaatttctactataaattattttcttattagtagagactataaattaaatagtattactaatagtataattatcgattatactagcattttcgtctaaatgaattctagcctttaaatagatatatatatactagtaagttatctcccacttttcttataacctaagaagttctgcaatatcctcctaagagactgtctttatctttatctttatcacaatttagtctattactatcttaagataattctctagcttcacagcggtattaataaggctatttttatattcctataaactatcgttagtaactctttcgggaatattacttaaactaccagagttagtagagttatcacaagatttctatattttttaaatctaattaatatagcttgataactatatatatatttcgagatatttttaggtacttaggcattcctcctctattagctaaatttctctagtatctatgattaagttatatatatttttagcgataatattcttaagctttttattaatactctctaaataagttttaagattattagttataatttcaattatttccttatagcttttaaggctatcagctataatagagaactatcggctagaaaggtatattagtataagtttaaatataactaatatatataaagtgatttatagatttatattattaagggtaataataatagttgatttataactagctaatatctatctaaaaccattaatatcttcgcctatatactttaatttagcctagtctcgaaagcttattttactagtaagagattgtatcgaatattttttaagttccttttcaaaatctctgcaggtatttctataataaaggaggggatattcgaggctaataaagtttatatcggtatttatattcaaggtttctgttagagcgctaagaactctatttagagtcttaagctcctctgttagattgtagatacgttttagataagattagtagctttaaaccatatcgaagagggcagtgctagattaaaatataaatatagctaaagctactaggccagatgctatactaataggttctactattaagtatcgcttaataataagtaggtagtgtagtactaggatagttagaaattatatacttaagatagaaaattacgggggttaagccttaactttatatttttaagtaaataataggagtgatccttatctaatcaggtctagatcataagcgcctatctcttatataataggacgaggtaaaaggcttgataccgtcgtctagctaggaggggtattatagtaggtctagaagctagctagctaataaataacgtctaggcctacttaacaaacattttgtagcactgaatttattcctcctaataataccctgaatctagaatcagcctataataatatatataattatagtattgacctcttttcaaatataattaatatagaagaaaatctaggctatagaggattgttaagaatactaggagctatataccttattcttatctccttacggcctacaattaagactatttgccgctagcagtttaaagaagagggctctgttaggataaattcctttaggcctggttgaccaaacaatttgtgcttttagctatctagtataatagtataacctaaatttctagttagcggaatatataataactacctaagaccattttagctcttaagtactagttattagcctatagaaattgctaaagattgtgataaatatatatattaaagacgaaaaaaatcgaatatcctagacctaagtactaatactcctttcttattattagtaagataaattattttctaagctaaaggtaattgcataccttagtctatattaatatctaatcctgattcttcttttatatagtaattgcgattagtaataagatagtaaatatcctctgtgtacttataaagatatattttgtatagaatatcctcgctatatatataacatttccgatcctttaagtacttttcctaaaagtattataaagtcgatttatacttactatatttttgcgttcgataataaataggaagctaggtatcgctataatattgaaaatattgccaaggttttttagccttctaaatatacttccctgccttttctagaagtaactcttcttataatattttaggaaagatagaagttgtctttattattctcccttctattatcgtttactctttattaggtttattagttagagctaaccgtttatattgtctatatagcggcctacctttaaggtaataatagtattataagattataacaactgctgtattttatctttaccacttagcttctaaggaataggaggtcggctaggttaacagcttctcgagaagattaatctactctagtaatatactatctatttatagggcgtccttcgcttccttattattaatagccgctctagagagctatcgcttaatatctatattcgcttatttatagttaaactccttttgaattttctatcttaataccctctctagctagccgaaggtattaagctttttatatacgagtttattatattacgattgtatctccttacttgggttatagatataaacgttagcctacttatctaatcggtagactgctttaagatactctagatattcccggatcgacgcctattactcggttattaggtactaaggccgccttatatcgatctacctacttatataggtaattatatgtataagagatatattagatttataaccgtttattatactttatatatctatattaatatattgaggaaggtaatattttaagaaggtataggaatctatatactttataattagattctactaggctttactaaccgtatcactattatttaatatctttctatctctatagtatatataatatataaatattgaataaagctaactgtaaatctctctaagattcctcggtcgaggactattatcatttttagagagttagagaattgattgagatttttctgtcatatatacattcgccttaccaccgtttttccgttatatcctactatttgtactatataaaaaagcctctcttttatttgtcatctaaccggcagaaaaagattgactatgcctaacgggcatatcccgacggtccctagagaatgaatcatcattttcttccccagagcttcaatagtcataatttacgtagcattagaagattagttattctgctctacaactgcggccgcccataacccccgtactattcgatctataaagaactagcatataacacaaagtagttttggtaggggtgcgtaaatagtatttctcttgatgtattataacatattaggtaccggcactgatcatattcgtcatcatattccaatgttcatgcctctcattgcccagaaagtctatccggtattatggccaaaagcgacctgaaacctaaccaattatcgcctcagactaagcagggtgagcgacgaaaacaagttctcattcgcagtcatggtgcgggtgccgggggagggacttctggctttttttccactttaggaccccctttgccccctcggcgattggtgccacctaacatccacatcgcgaaactcccggggacatctggtcctctggccttggcttttttaggagctagagaaaaggtaagcgcgtgtctttgggagtgcttgagagtgacattcttaccatctgctttcttcttcggctccgcaggcggatcaggaggttttacaggggccggttccggtgcagggggaggagggtcttcctttggcttttcgggaattggccacatgtgcatagtgatagcccagtcaggctcgaccacagtttcccaaacctgtgggaggataatgtcgccattcgggccaataaggtcataatgaccctcggcgacatgaggtccaatgacttcaatatggaggaaagcctgccggatgagttcttccatcccctataactaaaattaggacgagagaactatatgaccggagtgaggggttgacatacctgccaggtagcacatagttcaaatggaaaactgaattttctcccaacagcatccttgaatttgataggctgcttcttctctgggggtggtggtggcggcggtggtgggggcggttcggcagccttagcagctgcctcagcagcttctgcggccgctttggcagctgcttcattagctgcggccgttgctgctgctgctgcctcggcagcggccgcggcggtggctttctctgctgcctccttggccttcgcggcatcctccgccgcctttttttcggcatccgctcgtgcaagcgccgcagcttcctgggtaatcttccgatcatgcgcagtctgcgcatcctgggctgctttctcggcggccgcgcgttcaatagcctgctgtttggcaagctctttcgcttcacgatctagacggtcgtccaaaatcaacttctctagcctcgcaatttgctcatccttggcagtgtcaaccggtggaggcggtggtggagggggagcaggttcaggggctggagccggagccggagccggagccggggctggggctggagccggagcaggttcgggagcaggcgttgcagggggcggagatttaggtttgggttgcactggaggagaaggcactgggggatagggtggccaataatgagaaggcatcatgcccgggatcggtcctccgaaatagctgggttgatctcgatagaaaccagtctgaccgtaggccattaactcgtggggatatccagggtaaggggaatggataccgtggggacccatcgcgtgcggcattggcggcattggcggcattggattgtgcaattgaggcggctggcgaggcgcatgtcgtggatgaagttgcggttgatcgggaagaaaatgaggcccaggttgaaagtggggtgggtatccgtaaggcggaggagcaccataggggttaggttggcccgggtgaggaattctcatgagttccgatgtgatcggaggaggattgtggtgggcatacgggccatggcccgggggtgggggaggagggtagggagtataagatggaccagaggactggctaggggcatatccaggggcgggtggcataggttgctgccaccccctccgatcatttcgaccaaaattgagagggtactcatcggcggaatcggcactatcgggagaatctggtgattgttgtcttcggcctcgaggggcgaacgactggtgttcctgaaccatacgtcgcgatgttgggcgacggcccgaagcggagcgtgaaccgtggggcggacgactgcggtgcgaagttcttggtcgggaggctgaatcagatggtttcaattcatccggatatggcaaatgcgcccactcatcataatcctggtactcatgactttctaactcggaagatgtagggacatggacaccagacgagccctcgtcgtcggaataagagcgatccgagccgtggggatctggatcaatcgagatactgagcctgtagagaaaagagttaagggtgagaaagtgagtttcttaaagaagggggagggggatataggaaaacaaaacccaaacatacgtcatagagacaatgagaagcctttcagaggtttaaaaaatgtatatatcaaggacaaggacttgtcctcccactttctcgcatgcgcgaagtgaggagggaatacccaagtagggtttgaccagacgtgtaaagttgagggagaaaggaagaaaaaaaatgtcaggtgaaaatgatcgcgggggatttgcgcatggacgaattatctctctttgctttttctgtcttttgtcccttttttctcttcttttgatcggatctctttgaatagagtagaatagaaagaacagaagaaatataaaacaaaaacaaacaccctttttaaacgggatagggggtataagaaggacagcgtaggagtatatggagtacaaagtatgtaggacaacaagttcaggggtacagatatctatcaaagaaaagaaacagaacagaacgaagaagcccttttttagttctcgaatctgatatttcatcaagcccattgggcattttcttttgtgtgtttcttaaaccatctttttctcgtttcaatctgctgcccaaacggaaatgcccaatatctctatactccgatccactccccgtacaatgccccataccttactccatacatatgtacaacaatcgaacactctagatttcaacagatctgttttattagggtatgctcgaatcagaaggcttagttttgagccgcctgaataattacttcactggcgattcagtagttctttggctgcaatcagctcgcttcgactcgatgcccaatattggtcatcgatcgaccgtgactcaacaatctcgcctaactttaggagcgcaaaggccttcaatcgttctagggtcttcttgggaaattgacctgatacgccagcgtaatcattgtcaagcatccgagttgaggcctacgggggaaacccgggttagaatggaatgagccaataccattatttgccgacttaccaaagttaacccatagaatcctcgcaggtagtcgtcacaaagctcaatgcttcgactgaaatgttgcaccgacctcccaaggagccgggatgcgtccccatcggaggcgcatatgtatagcagttcaccgaggcgggaatggatcttacattttaatgttagcgaccatttgatttgaaaaagaaaagaaaagaaaagaaaaagaaaaaaaggtgcctgcatgcatacattccaagagttaggagcaatgagtaaagcctcttcgaggctaaaaatggcttgggaagccaacccttgtgactgatacaagtcggccagttcacaccaggcttcagcatcagtagggatggcatcgaggagctgaataagaccggagattgcatcagatggtcggttgagcgagcgtaataacgccacccgccgcttcaggatgggctgtgtgtatggttagtcttgcatagcccatgactaccccaggacctgtaaccaatactgaccacattcaccggactctgtgacagggtattgtcgtattcctgcaggcatttctctagcgctgactgatccttggcggttgcctcctcgtacagacctcgaagccccatgatcctttcattagatggtccaaaccggagactgaggcgattcaggcaggtatgtgctgactgatcatctcccgtccgaagacaggctaatagaagctgttctaatcgtgcatagtaatctgcagtttctgaagatttagatgaggtaactccagacccggatacctggcccaggatcgctggtgcttgttgagcaagatgaagagcagagatcagatccgatccgttcatctcacggatatcagcgacgggaccagccataatagactgtcaaaaaaagacaacacagcttcaaatgaccttgagaaaaatggtgctaagccgagagagcaggggtgctcctattaggacagatgttaagagaacagagtgcaccagagcttaactggccagagtcccgtgatccggtctcttatcggggatccccccaaacgccaacttctccaccccgcggagcttgggttgctttacactcaacatctttcatttttgttctgaactatggctgatctgacagcccaatttacaatgcacctccagtcttactaggggaattcgttattattcttcccttgactcgaccttgtgaccattgatagctcgacacgatgtgggcacccccatgtttctgccctagattggccaccactaattccagtaccctaggtttgaaaaatcgctttatgaccttataaaaggtctccggggtcacaaaggaggcgaaaatgaatacatccagagttcattgcgtgaatgcaaggccgagatcaaaacacaagacatgggtactaactacctatttacccggcaatggatttgatgctgatgtcgagtagacaaaaaagctacagccctattgaagctcatctatcttgaaatgtttgggtatgacatgtcatgggcatcttttcacgtcctcgaagtcatgtcatccgccaaatacctccagaaaagagtcgggtatctcggagcagtacagagcttccgaccagatactgaagttctgatgctggcaactaacttgctgaagaaggtttgtaccctgcatagcttcaaattccccttagtcgctaatgctcttgacaggatattgtcacctccagtattcccaacatgtcactccctttggtcactttgccgcacattatcacaccttccctagcaatgtccttgcttcctgatttactctcccggctttcgcactcaagccctgtggtgcgtaagaagacgattgtctgtctctataggcttgctttggtgtatcctgaagctctgaagttggcatggcccaagataaaagaccatttgatggacgaccaagaggatggaagtgttactactgcagcgatcaacgtcgtttgtgagcttggttggcgacgacctcatgacttcctccctctggcacctcgattctttgagcttctggttgatagcggcaataattggatggctatcaaaatcatcaaacttgttagtcccctatgcccccaaccctatggaatgactttcttctgagcaccctctgacttctgctagtttgcaacattaaccccgctagagccaaggctgactcgcaaactcctgcgtccattgacgaatatcattcaaaccacatctgcaatgtctttgctctatgaatgtataaatggtatcattcaagggggaattttggacggagaagagaatctccaggaaagggacgaagttgccactctttgtgttggtaaattgcggggtatgatagttatggatagtgaccctaatcgtgagtatccttttatcgcatttcaaatatatgatcactgaccatcgaggcagtcaaatatgtcgcacttcttgcgctgaaccgcattgttgctacgcatccaacgttggtttccatgcagcaggatgtcattatggattgtctggatgatgcggacgtctctattcgattgcaggctttggagcttgccgttggaatggtcaacagtgattctctccagcaagtcgtgaaccgtctactagatcagctgcaacaaacctctgtgcctgcagctgaattggttgatacgcccgaaagcccgaaagccccgaccttatggcccaacgactaccagactgaggttgttcaccggatcttggatctttgttctcaaaagaactactctgaaattgttgattttgagtggtatgtcgctgtgttagtacagctagtcggacttctcccaccgtcggagagtgaagacgattggagtcatccgaaagagcaagaggctataccaaattcgaggatgaacgttgcgcttcgaatagggacagagcttcgcaatgttgccgtaagggtaaagggtgtccgtatggaggccacaagggcagctgagtctctcatgtttatcgacaacagatcaacttttttctccttcggttcaaccatcggcgatggtgtcttaggccccgtcgcctgggttgtcggtgaatatgctgaatatctactgtcgcctaatcggacactactgtcgttgatcgacgtctctaatgcatccctcgcccccagaactctttccctctttttgcaagccattccaaaggtgtttgttcagattagccagaccagtgaaccaggagatctttggagaagtgagatgtcgctattacttgctcgagtcgttgacttcctcgagggtttggcagcccatcctgatctggatgtgcaagagcgagccatcgagttcctagaagtcctccgcctagcagctgaggcattgacttccgatacacaaaaaataccatttcttctcgcttccgtcataccaaacctattcacagggctcgaactcaaccctgttgcgaccactgcgcagaggaaggtcgtcttaccagatagccttcgcctagaggagcctttcagtcacgatctgccaggactttttcgcaacctggacagcccatcatcgcacgggtcaaagccttgggaaataacagacttctatcatcttcctgaactctcgtatccgaacaagcagactcgtgacctcgcaccggttgatttgcagccccatgcgtcatatcaaaactttaccggtcctccggtggaatcctctactacactacaaagaagaatgcttgagcgtagagaacgcttcaaggatgaccccttctatatcgctccttccggagaatcatctggcacatctacgccattccacgaagctctgagcacatccaatggcgaggtcttggacattgattccatccccatagttaacttgaagttgggagatgaacaggtcagccatgctgatctcgatcgccaaagaagtcgtcgaccacccgtgaacaaattggtagttgctggcgatgagacctttgaaactccgaactctttgacagaaacccccaggactaagggtgcgggtgatgaccatcctatgtataagcgctctctgctccaagttgactcgagcagcctagggaatttgtccttggaaaaaggcccatccccccaagtttccgcagatgaaggggacacagaaatggcccgagcattgcgacaagtggaggaagtacgattgcagatgcagcgagcatcggagcgaatccaattagagggcactccggcagaaggaaccctagtcaagaagaagaagaagaagacaaaaaagtacgttacttcagaccgagataccggcacggtggttgaagaccctacggaacccgcgacagggaagaagaagagaaagaagaagaccaaggaatccgaaaagctaccaggcgaaaattgaatatcttccaggccggcggagtgaatcttgcaacacgtgtggtatttggctcaagcagcaacagtgagatacaatcaaataatacatatttcaaaagaaaaaaaaaggctctctgacatgcgaaccatcttgattttgacattcatttgttcccaaatccatcccttgttcgtggtccattgacccctcgacgtgagtgtggagtatgagggatggtcggtcatgctgactcgagacatatcggaaggctataagctagggtattggcacagtaggtaaatcgtcgcttgaagtccattttatcctgtgatccgtgtgaaccatgaaaccacagtggaccagaggtcagggacaatccgtaggagctctagaagaagaccgccgcaaacaacaaaagcgagtagcactagagactcttcagcacggcttcaatttaacagtggagttcagacacataccaacccagcttgctgaaaggggcgactttgtgttcttcttcggtttaattgtggttggcgcctttcccctctttgcggcttcggtcttcgcgaagcggtcatttgctcgacgttgctgtggtgtttgtgcctggtgtgtgttaatcatcatacacaacaaacctatagcctctggaccttaccatgatggtttgcgtatgagagagatttgagggagacagatggatggggaagggataattcaagacgtgaatgtgccggcaaaaaaaggccacgttgttttttggggagacacgttactatatacactttggccccctgaaattaagtggtttcaatctccagactaattgcgcgatggacgagtagttttcaaaatagattcaacattatgccttcgttgtcctgatattcttataaaaagaacaagaagctatagacaaagataggtatagggaaaaagcttggtttgagatggtgtagtctctgccacaaattacgtacattactgtaatctgtcaaatggagaatcctgttctttcactgtctagagagaataaatatacatcgatgtccaatatatacgattatactagtatggatatacgacatggagtatacggggaatcagacattccaaaggcggtgtaaacagtcggagaacaaggcggtcagggatgacatcagtggacttagtcatcttagtcaggctcagacatcgacctcggtaactacgattggaagacatagttatgtaccctagttaggtaatctaaaaccagcccgggcacaaagtaatcttattattcacttgaaagtctggtattgtaatatcgctacactaaatattcagaatctaagattgattattgtctatacatcaatgggccgtttatcattgaagaagcggcttccacccgatctgctcactggccgagtcactgagaagatcggtagagcccgtatcagcagtcacaccactccctggactatcctgcgatgatgtgtgttgactagaaggcgatactgccccgaccttcgtctgagaacttagtgatagcggtttacgaggaacagccggtcgaactttcgccttttcaactgcatggggcgataaagaccccgtgggggactcgaaagtatcgcgtcgcggaggtagcatgggcttctccctcgtatcttgaaccgggtcggtgtttctgttctttagggagcctagacttggtacccaatcgacatccgcagaaaatggattggattttcgttgaggatttggaatatacccttgcttcggtggttgtactgttgcctttacggatgcgcctgtcatgcgttaggaacacccgccatatccgcagaccaagacactcaccattgtctagccaccaccggcttctgtcagagcttgccggtggcagccccggtgcgatagaaacatgtgttgtcatttcgtcgtcgtccaagtccagaagagagacagagtctgcgaaagaattgtgaccgtggccctgtttctcctcgtatatcgattgtctgaggctttctttcagtgcatggtcgacgatatcaatgacacaatcaaaagttgcccagacgggacgatggtcagacactttcaaatccgcagtttggtagttcgtttgccgcagattgcttcctctccataaaattcggtcacaccatgcagggattcgtgatttttcactgccatatgttagttgcctcttggttagattcacagtgtacttacgacgtatcatagatgtctcccccaacgtcgtacttataagtcggcggaaactcgattgggccttctgaatagaattgaaacaccctgcccgctaccatctgtagattcaactattgttgttagcccaacgtcgggtgtcaaagggttatttgccttacttgatcattgtcgtatagcctttggtagtctcgctgtaagatgagctctcttacgcttgggttatccaacccaattcgatagttgaaatcacctaaccagatcactgcgtcatgatcagcgattgaccggttcttttgaaacctcagcgctcggtcgatgatctcatagtctctatttctttcatcgtagtttgcaaacccggcagcaagatgagcggtaacgaagcaaatactcgtgttggagaagtcgaagcgaacagcacagccgcccttgttaccagcaatcccagaaaggccggtctgtgaataccagttagttggaatagccccttggaaaatgtagaatgacttgccttcttcacactgccttcaacattcttgatatacttcagcgaactctcttttacgtagagcagaacagcagcgccgactagctggccacttctcaggtgcacgtattttccagtccctttcatcttcgaatgggtgtttaaacaatcgtggaccgctctttcccagaccttgcgggtgctgggatcggtggacataatttgctgagggctcagggcgacgatttcctggaatccgacaacaaatattgttggatcttcgtcggactcatccgactccgggaaaagccacggagtgagatcagtacctgggccttcattacgtccattcacattgaaagtgccaacccagaaccgaacttgttttcgcgaagaatattctggagttcggtggttcaactcctctataaccaaatcattgattggatcgtagaggtatacagggagttgatttgtgagcctccctaaaagaagatcaatcgtcctctgtctagccttgtccgtgaaattgttgacataaagtcgagtagcactcttccgcgcatctgcaagtgcccccgcaagtgacatctttccgtgtcgggtgaaagaggatttgagggcgccggtcccggcataaatcttcgaaagagcatcaccattgtccgcccagatggtggaatgccgaacctgcatgtccgaactgagcctgccgccttgctgcgataaaaaatactccaatgccatcaaactgatgatagtctggacgaggtttgttctatccaggcagtccaggcaattggtccgaaacacaccctcttgctgtaaaatgaccgaagagttgttcactgcatcatctctgtcgtagggggttttgttgggacgatgtgaatcttccgacaaaaaataggaaaactcatctaatgagttgacaagctcatgtttgatctgggagctagcctcatatcccgaaggacctcgggtctcagcaagaaaatcatattcggtaagtcgcaaaagactccgatgtggggacgtcccgtcaccttctttctgtcgcgttgagctcttgctgatgtgctttcgaaacttcgacgacaactctgcttctccaggcttcagctcacttagcagatttaccacatgtactgcgccatattccaactccagagcttcaaagtgtttgttaaatgcgtgctgcgttgcgtcgctcgaccgcgtgacctcaatcttttgctgccccggaatgagccctggggcttgttcccagaaaataggtaccgagcctcggacttgggcatatgaaaatgcaatgcccggtgaaacccatagaatggtttcggtttgcacgaaattggcgacattcccatcatcgtcaatgcctctcgagttaaacctcgtaccagcacggcgagaagcttgccgggatatgattgtcaacatcgaagggaagtttgtccgcacatgaggaaggattgaaaccgtcgctggcactttgagtgtactggcaaatccacggataacacaggttaacatctgcgatgcatctaatttggccttatctgatggtggcaagtggctccgaaacaagagaagcggactgatcatgtaagagttccacagcatatcttcatctagagtatcgatgtcgaatgccacgggtttgttggcccttgcagtattgttagttgaaaaagatcggccagtgaagaacaaggagcggatagcttaccggtcttggaggcgatccgtaaggttaaaatcgagactgtaatagaaactcccatctccaaggagcttcttcaacgccaggaacggatggtcagttaccacatctttcccgtccgtgccgagtccctcctcggcggcgaattgagacccggtctcatggtccaaaccgtactcgtattctgaacgattgagacaatcttatattgttagcaattagtcggccagaaaggtgcataggaaacatacagaagcctacattgtcaattcttgacacggtttctccgggtctcacggtggcagcttgcgaggagccggtgacgacgcagacaaacacatcttcgttgagagtaacaaggccgagagtaccatatccatatcccaacggcctgtagccttccaggtccacttcctctaagtccgagaactcgacttgacagcgtgggctgtccttcgcactggtatcggttgatgtgtagtggaacactagggcatgttcggaagagaccagcgcaattgtacgttgaggttgatctcgacagagaacccggagattcgacatggcgcgagagaaatcagagtgtggggagaagcagtggcattgcttacttccacaccaataagtcttatcctatttcggcgatttctatgtcctagaaaaggaccacttcaccacaagagcccgaacaaagcgaagaaatagcttcgattctcaatattattaaagaagtcctcaataataataatataagaattattgtcgagctgaggtggagttgtcaagagctctcccggtctattctccccgcgacgtcgggagccctggaacaccggccttatcggttgcttactcatcccgcgtctctccacttttttttctttttcttttttcgattcttcgtcgatctccaacaaacacatttctctgattgattcgatatcgtcgtcatgggcttagcagggccgaggaagtatgcgacccaactcatcctttcacgcatgattttctaacgcccgagtaggagtaccaagatcggcaatgatcccaataacaccaactggacccggtccacaaccggattcggacatcggatcatgagctctcaaggctggactcctggaagtcttttgggagcaaaggacgccacgcacgccgatttgttgaccgccgccagtgcttcccatatcaaagttaccctcaaggacgataatctcggattgggtgctcgtattggacgagagagtgagccgactggacttgatgccttcaaaggattgcttggtcgtctcaatggcaagagcgaagtagaactaaagaaagatgaacaaaaacgtgatgacgttcgattggctcgatatgctgccctgaaatttccggaagtcaggttcgtccgcggtggactgttagcacaggagaaggaaatcgagattcctcggccgacccctaaggatgaaacagccaagagatcgaaatcggacaagaaagaacgcacaaagaccaaggacgacggaacctcttcaagcgaatctgatgccccagcccgcaaatccaagtccaaatccaaatccaagaaatcgcgctctcgagacgaaacagatggcaacgaatcaagctcggaatcaaagaagaaaaagaagtcgaagaagaggaaggcagattccgagcagagtgaatctacagacaaggcatctgaagcggaagtcaaggtagctgcaccaatttctagggagcggcggcctatgggacgaaatgtcactcgttcacgccatatcgcccagaagaagagagctatcatggacgagaagtctctgaacgaggtaagctgtgcagcaactattttccattatatctttgctgaccttaaccagatcttcatgatcaaagcatagagtttatgcaagtctgcatctgaagcgcattggatataaaacttggagttatttggtgttttcactttctaagatttcccgtcttgaactagatatatcctgttataaatcaaaataatttcaatctcaactattgttatatcatgtactccgtatataccagctacccgtaagcgaccactcagggtggtgacgcatacgggttatagtttgctgggcgtagacgaagcaaagtctattgtagggagttatagttttgccgagatatagattacctaagctaacccgttccccgggccgggtgccttgcagtatccacattcaacgtcatatcaaacctcagcgtgtttgtccctaatcgcggattgctcggcattgagggtgcacagtcccgactcacgccttaggagaatttgtacaggtcacttgcatcgaatccccgacggagaatcgttccgcgatctaccacaactcccataatctctggcaatctacatgaacttttagcacctctcgccctgccacgacccgagcggagactgggagctgtgcagaaactgtgccaccacagagggttgtccctcctcccattcaacaatgaacggggagacgttgtcagctggacaggcctcggcgtccacatctcagtcgagtcgcggaagaaaacagtaagacaggtccaacacctcttgaatatatccgtaactgactcatatagcatccactgggcacctttgaatattggtcttgagagacgcctacaaacattcgtcgtgctatgccacactttgactatcgctatcttcctgactatcttcttttttacatgcgccatcccgttgttctggccacttttggtcccatatctcgtttacatatctcttttctctaccgctgctacatcgggcaatctcaagggacgtagcccattcatgcgctcacttcctatctggaaactgtatgcatcttacttccctgctcgtcttcaccgcgaggagtcacttccgtctacaaagaagtatatctttggataccatccacatggtattatctcccatggtgcgttcgccgcatttgggacggaagctttgggcttctccaaacttttcccagggatcaccaacactctgctgacgctggacgcgaacttccgtattcctttctaccgagaatacgcacttgccatgggacttgccagtgtttcccgggaatcctgtgagaatattctcactaaaggaggtgcagacggagaaggcatgggacgagcaatcacgattgtcgtgggaggtgcccgggaatctctcaatgcccagcctaattccttacgtcttgtgctgaagcgacgaaaagggttcgtcaagctcgctattcgaacgggagctgatctggtgcctgtcttggcctttggtgaaaacaacctctatgatcaagtagactcggatcagcacccgatcattcacaagcttcagatgcttgtaaaacagactttaggattcaccattcccctgtttcatgcacgtggggttttcaattacgacgtcggactgatgccctatcgaactcccctaaatatcgtcgtcggacgaccaattccggtcatgcagcagcagaaccgcgacaagatcaacgatctatacattgatgaacttcattctcgatatgtgaaggagctggagcgcttgtgggatcaatggaaggatgtctatgccaaagacagagaaggcgaattagagattatctcatgatactacatctttatgtacgggttgaccggtctactatgacaacatgtgaaccctatggggcatattatacagcaatactcatagagaaataagccagaaatgaatccgtacactcgatctccaatgtagttcggattaaataacacgcgcgaaaaagtaaacctatgaattgggtatcagatcagacaaaatcagagcttgcgcaaaagcataaaaaaatagataaaaaagaagagaaaaaaaaaaaaaaaacacatcgaggctttcatcctcggaatggcgagctgaggttcggatcgcatgaggtagcagttgggtttagacctggcacttccgctgatgaggatactcgtcggctttcactagcaatgctcctgttcttagcactgtgcccactttctgctcgaacctgaatcatttcctccagcatgcgtgagacctcgtccatattcttccccgggtcctccttttcactcctatcagacaagggacgcttgcctggactcgcagacagtgcaccgaagccattggtccctgcaaaattgtctacatctcctgtagtagagccattcttgctcttcaactctggtgactgcgagtcattagtcacagcagccaagtctcgatgcctagctgcggaccgaagcgcagcaagcatacgatccttatcatcgagctgcaaccgaagctcattgatctccatgtctttctcacgaaccacagcggagacatctggatgctcggcaattgtagcatttacaggcttaatgccccctgacattcgggaatgactggaccgtcttgcctgaagcagccggcgctctagggtagagatgtaacggttcttatcaccgagatcagcctgcagcgcagtgatctgtcgttgcaagctggctttgccatcaccaaattcaccaaggtcgtactcgtcctcgttgccaaacgaacctcccgtgtatatcatagccgacgacggatcgttgctattgacagacatgaacgagatgggccgaatcgatgaatgaccggcacccagtgtagattggctggcggacgaacgtagtgaacgtgaacccgaatccgttgcagacatgcgagaaaaacgcccaaacgcagagaggctattatggttgttgacaccggtggacttggagctcaaaatcaggcgattgagatgttcgatccgctctttgagcgcagtccgagccaactgcatttccaacacctgttcctcgtgtcggacctgtgcttccttttcatattgttgttcgtcccatttgagttccttctccgcttgggatttggcctgagtatcaagctgaccacgaagagcctggatctccatacggtaccgttcaagtagtacccgacttccggaatcaccgccaccgccgccgtatgcctcctcggcctttttagcatgactgacaatattattcttcgctcgcgcagcgaatttcatggtattcagagtttcaccggtatgcgaattgatcgcactcgaaaactgaatggtgcagagaatactcacaagcgaaccaccggacaaggctggttgtaggagtctggtcaacttgctatcccggtaaggcaaatgcctcccgtcacggtccatggggttgccttgcttatccttattttccgagagccgagagatgatggttcccagagtgagcagacttttgttaatatgagaaccttctgtgcgacgttctttatcatcggccgcacgctcagagccagccagatcaatcagactcaaggtcgacactcgcacaccacccgggggaatcccggcgcgcttatcttgagagctgccggatggcactcgctctcgactctcgaccacgatctgaaccaccgcgtgacttcgagaactgcgcgcattgaactgtgtgctgctcgttcgtcgtgcatggtcaccccgggcgataacacggaggagttgtgtcgggctctggacaatctcttccttgagcggcgttgcatatactcctcgtttgctgtcctctctcagtttgatttcctcctgctgggttcctgcgggggcgttggcagcggaagcggaaaggaggtcgttaatcttctcgttgtagatttctagatagctgacccgcagtaagaattcccgatgtggggtctctctgatgaaggaaaagatgtcggtgattgcgagcgggattacaccgggcgaagtggctgttccctgcatagagaaggtctttccggttcccgtcataccatatgcaaacaccgttccgtgatagccctccataacgcgccggaccagacgtttggcagccgaatcataaaccttggcgttgttttcttgtggattaaagacattatctgttcaacgtttagttacgaggggtgggcaagtgagttaaggagtatcattctcaccataaaagtaatcgcctccttctttcccacggtatgagatgaggctttgccggctatcgacggaccattcgccatgattgcggggagtttcccctccgctgttgttgtctggacgaacgcgcacgctgaccagcacattgcctttgaactcctttggcttagagcttgattttcccatcgcatcatctgcatcttcaaaggttgtcgcactcgttgagcaagatccttgggcagaagaacttctgctgtgggttggagacgcctcttgatctcgcgcgtccccacttgatatgtatttcccctcgccactgccgttgagtaatgatagggttttggagctccgataactgctcgtagtgcctgtgctcagtcgcgagcttctttggggtcgcccgttggaagtagcaccttggattccagagatcgatgatgcagtggatggacgactgctggcctttggtggttgcgggaacgaggcgatactaattgttcgtcgcaaagatttgtcggggctaccaggagtgcgcccaccggaagctgaccgagccgcgtttaggttggaggttgagtttgaacttgatagaggtgacttgagcgatggtttggggctcgatggggtccgcaatttggaggtctggtagggggatgcagcatgtagcgcgtcggaacccgtcgaccttctaggtttcgagttggggaggggctgcgacagctgcgagggctgtggcaatgtcgacattgaggccatggcgaatttgtatctcctaatgcgaaatggggatgtatttaatgggaatcagtgaacgcgatggccatgcgggcagattgacgaggtcgaggttgagcctatgccatttttcagagttagccaaatgaataagacgtgaggattgggcccagtcaaggcccatgagataaacggggattctactgcagtttttttcgccaaatgcagtcttggggggatcgtcaaaaaatacatcgcacacggatgttatgatgttatgattttggtctcgggtactcacggattcaagacgtgtgatgttgcaatcgcgacggggtaagaaagaagtggagatggagatcaaagaaagtcacgaaaggtaataaaagtaatgaaaagtaaagatgaagagagacgcgaagacgcgaagacgcaaaaacgcaaagacgcagagagatcagagagaaatgcaaatcgagtccccgcagaaggtcggggccagactgcgtgtaagactatatttatggatgtctgggtgttttatattacatcgtcttctctaaatccttatttcaatccttatatctatctatcattctctgctctgctcctctctccttctctccttctatcagtccccctagactcactatcatagctgagaaagcactctccttctcttatatctcccataagagccaagtatatgaaaaaggggtcgctaaaccatcacaccttttcgacgttaaaccgaagggggaattcgctgggaagctcggggcatctcatgtccaatgatagacagtggaggtttcaggttcgggtcaggaaaaagggggcgaatgagatgtttaagtctgcagttcgttttttttggtgggaccaatctcattatttcgacttcaaggtaggatcgggagattgggagctgctcctgttgtcctgttgtcctgttgtcctgccacattaccgcttgccctcaagggttgaaggagtagactccaggtactctccctctaaaggtgaagcttgggatgaactcctgttcgagacagtaccaaaaagataacggctattcgaatcaagcaaagattgacgtctaagccaaaattaaaattaatctgacgttgatcctcatttgcgtcccgttgtcccgtgatctgtatatctgtataactatgtacatctgcatctgctgtatacacttatatgactgcaacatacaaagtacagtgtgtaactaactaactagtcatatttatattggatctatttgtcattcggataacctctttttatttcaaactcaatctggaagcgaggaatacatctatgcaagggagcctatactcatagatcgcagccctaacttgaacagtgcgaacagtgcaacgtgatagattggtgatcgtggggaaaatccataaaatccctgactggaggacaatccaatagttgttgcacatgtcaatgtcatgcatatctaggtagtgtctcgtaatacacaatactattattagcgtgcttttgcttttctttgtctatactgtacatcgaatattgtattttgtctctatggtgtcattatttcataccgaaatccagttgccgggcagcactgttgaacatgccctcatccagctcgccgacacgtcgggtcaaatcatcgcccatctttttagtcccacccgatttccgcgggagatcttcattcttggtcggacggggttcaatggtccaccagttgtgccgcaagcactggacagccgtactgcgcttgcggggatcaagcgcacacatcgacatcagcaaatcggcacccaccgggcctgcagtggggaactgtcgcatgaagaaatcgcgcccttgcaacggtaccaaatgggccttgtcggtgggaatgtagtagggcaacttgctgacccctggccagttctcctctgttggtgtgccgaacgcttcgcagattttggaggtttggtccaggtcggtgttacctgctacgaagggaacccgtagcaggagctcggcaaagaccatccccatggaccagacatcgactgcgccggagtactgtcgcgcaccgtaaagaagctcgggtggccgataccaccgagtgatgacctgatgggtcatgttgaacaagggatcggcaaaggatcgggcgagaccgaaatcggccaatttgacctccccatctgacgcgatcaacaagttgttgggcttgatatcccggtggagaacaaagttctcgtgacaccaccatacaccccgggcaagcatccccatccaagccttgatatcagccacaccgtagtgaatgtcactatctttgatgagcatctcaaggtctccaccaggaagaaactcaagaaccaggcttagattttgatccttggaagagaaaacatcgtggagggcaatgacattgggatgtttcagctcttgaaggtacttcacttcacgaaccgcgtccatagcaagtccatccttgtattcggcattaactttgatcttcttgatcgcgacgagggatgacggatcgtgtcggaggtggccaacatataccacggcatatgtaccctctcctacttttttgtctagttttaagttagcaaattgatccttagaaagtaatacagcacatattcagctacctttgacgtatcgttcccgaatatcgatatttaattgttcggtaagttcgcgatccccattctgcacaggctttgccacagctgcagctgcaggcccagtaattgagttctgtgcagcagtggctctgagtctgattgctgtatttggggaatgcacagtcatggatggcgaacgagagccgaagggtgagagtgccatgattagaatgatttgaagcaaaaagtcaaactcctgggatagacagtatttaaaaaaaaaaaacagccacagatactgagtggctattcttaatattaagagatcatctttagcaaaatatcttctaaagtcaaggcagtagtgtcaagacatgagggccgatgtcattcccaagataggctggttcggagtattgttgatcctggactttgttggcgactcccgaaatttctccaagtccgtcaacagcgaccccagccaattcctcggcaactgctggaaaccagtcaatctcaaaggcctcgctcagcagttctcctcatccacaccactacgaatccaattttccggagaagaaaaaagtacagttacgagcaaagtcggggcttgcagcatccttcccgcaacaccttcactatgagcgtcatggcaatgcgcaattcgccgctaggcagcttgacagcgcgcctattcaagcctgtttcaatttccaaccaatacattcgatcactccacaaaaacgcgcccccgcctgtgccatctccgacccctttcgttcccgacgttcagaccttcctcacgctgattggccgcgaaatgtctaagcaagcgagcaagatcccctcatgggaagagcttttcaccttaaactcgaaccagctccgccaagccggcattgagccagcccgccagagacggtacctgatccggaagcgcgagaagttcaggaacggactgtacggccctggaggcgatctggagactgtggttgatggtgttgcccaattgcgggttgttgaagtgcctattaatgccagaggcctgacacatgaaggcgcacaaacggcagttcaaacttcttctgctacactgtcacccggcatggtgaaagccattgttaacctagcgcctgatgtcactacgtattactatggcaaaaaaaacctgatcaagaaatttgcgcatatgaagattcaccgtggctgtcagccgatgggcccgttccttcagcctttgaagggttccaatggtactgctgctaccatttcggtccaggagggtatgtgggaggacaagcggggacataaggttgatggtggcgagcgacgacgccgggaggtccggaacaagaagaggttggatgagagaaagaaggcgtgaatgtgaacggtgaaataccactttgtgtatcttgcatatttcctgttgagcctggatgttcaaattcgaactgtactatactattgctatactattgcaatcatgattctttttccatattctttacatcttttacgtgttttctagggaaagaagcgagatgttgttatgtgcctgattaaaataatatgactgagctatgtaaacgtttagagaaacatgcgattcaaagccgcgaaaggtggatggatattcatacaggaaaatcgtttcggagtgaagaaagagtaccatgatgcgagagctgtcaattccaggcggacttggctcaaggtcagtctgaacctttgatgcatcaatgcagagcattaaaaatgtgatcaaaatttgaatgagaatcttttctaaaccgttactccgatcatgctttgactccacgtctctcatactgaacaaatgatgtacccagaggcttggagaagagggactagaatatggttagtcaaatgccaggtcgatcgcaatagggcatcacttaccgaatagtccgtctcggggaagggtgtaccggcgataggcgtggagaacttgaagtgtctcaccagcgcagccaggattgtgcccagttgcacataggcgaactgttcaccaatacagcgatggcgaccagcaccgaaaggcagataaggactgttggtgcccttggttaccaatccataaccatagtcgatctgctcctcatcttcatccttggtattctcagttgaagcctcatcccagcggtgagggttccacttcagaggctcggggaagaactctggagagcgagcagtaacaccgggagaagagaggacattgtgagtggtgggaatgacataagaagtgccctccacgggcatggggttcttgacggcgcgaatgatcgagtggataggagcgtggatacggagggtttccttgatcaccttagcgtgcaagtcgagcttctggagtgcttcgtgggtaagaggaggcaggtcagagcccagaacctggagttgttcttggtaaagctcctcaacaatctcagggcagctggccaggcgcagaacaatccaggcagcagtagaggacgaagagtgctggcccgccataagcagcgcaatcatcatgtgggcaatttcctcatcaggaatcggatttccattcttgtaggtgcacgacatcaagttccagaccatatcctcggagtccttcttatcaccggctgcgcggcgcgccttgatgatgtccatgtacgtctcggtcatcttcttctgcgcagcatcgcgcttgcggttgtgagggagcggggcccatggcagcatgaagttgataggagcgaaacccttatcgaggtcgtggtacatttcagcaaaggtcgagtcgaatcgatcgcggacttcctgtccttgcaacgagcgggaggctgtgtaaattgtgatttccgcaatgaccttggaaacattgaaagtacccttagggtccttgaacgcggaggaattcttcacaaagtcatcgacctcattggtgatcaagtgaacataagaccgaagtgcctcggaggtaagcccgaatttgacaaactaggcaacaatcagcagcccgactttttggtgtaatccattcctgcataccttcttctgctccatgagcttagcattggggcaatcgtagacgacgtgacgaccgaagacgggggtggtgaggggggagtaaacctcttcggcgttcacatcacgaagcttgccattgagaataaactcatttcccttggtgcctaggtagacggtggttttcttgcccaggaggacaaaggtgaagatgtcgccatactgcgtttaacctcagattagcaattgaattgatccatgggccagccagacatctgcgatcgacatacctttgcgcgagcttggtcgaagaagttgtatgggttcatgccatagctgatggtgcttccaataaaggggacccagtggaagaccacggggggctcatgggatttcttgaagaagagctggcacagcacattgatcacaatcgatagcgcaacgaatgacagtgccccgacgctggccaaagtgtagattgactgggtcgagcagtgctcgcagaaagtggcgaggaaagttgcgaagaggcccatgttgtcaggagatcaaaggagagagagaagaaaaacagcgggaaagggaaagaaaacgggctcacaatgaccctacgaccctgtttgttcgtccaattgaataataaagaaagagagaagaagttgagtgaaggttaaacaggaggcgaaggggaaaataattaagtccgatatcattcggcgagagagacccgcccctttagggagtacgaagtacggagtatggagtatgtgtctagaggagacgccaagcgatataatttgcatcgtaagttatattttatttcttatttggtgttagtgaacctattttgtgtctattttgtgtctgcttgtgtctattttatgaattatctctcttttatgtgatagcattggctatatagccacatcatgccactccggtcaaggggttcccgctagatgggacgtatattgactattgggagtatttaaacacacaggacggagtacatatcaaactattagcgtatggagtacctagggagtacatagcatactatctcctcttgtaaatgtatcatttcacctgattttgacctaataatacatgaaccctatccttttgacacgcccctagccctgataatgatatcccgaagtacacgcaaaagtcaataataataaatcaaaagttgcacaaagccacacagtaccccttaattgtcgtacaaggtgggatcgccacgctctccaatgttgatgaaatctttcggggcccggttgccacttggtgagacttcacgttgggatgccttggctgggcggttatggacacgcttcccggcttcatttcggaatactttgaccggttcctcgctgccttcggcgtgctcgctgaagttggcatcgttgatgctgctcaacaaggtccgctcccgttgcaatttgcgcttcgaaaagtccagtttaccaatagcccccgtcaggccatctgtgctgtcagtgagactcgggtactttccggtcatccaaggatgctcaagacactcatccaccgtgattctcttgtcgacgtccacggtaagcattctgtcgattaggtccagagcggggtcgccaacggagtcccagtacggtgacggatagtcaaacttgcccatcttgatctgctgggcgagaatgaatgggttctctggagtgttcagttcatccgagaacggcgggaagccacagagacagatgtagagaacaacgccaagggaccatacatccacagccttggtgtatttccggtggcgggtatcttgcaaaatctccggcgcaacgtctgcgaaattagtattaacactgcggttccaaggtcatatgctttgtgacttacagcttggtgtaccgcagctggaagcgaattgttagccatcattcacattgacacggacagacatcacctacagggttgtcgtgaaagattcctccccaataattttagccagcccgaagtcacccaatttaacgttcaaattcctgtctgcaaccaggatattttctggcttgatgtctcgatgtacaatacctcgttcgtgctgatgacacgttagctgacccagtactgtatatgtggacttttggtatgcataccagatatttcaatccgtcaaacagctggcggaacacaccacgagtttcatcttcggtcattttattattgttcacaatccagttgaacagttctccctccggtgccaattcaagtaccagataagcgccgccactttcatcgaaggattccttgagacatagtagattcgggtgatgaacgcccatcaacaacgcaatctcttgctgcagagcattgtcgttctgtgacttttgcgggtcactgaggcgtctttcaaagactttgactgcatacttgtctccagtagatcgttcagcacacagatagacggttgcaaagtggcctttgccgagctggctgagaatccggtattgctgacggaaaccattcgtttcccgagtacgggggtagcggaagacaaaacgggcttcattcagaattgaaacttcatcgccgtcctccagttcccggtgcttgttacgcccaacaatggcatcattaacaaatgtgccattgctagagagatcctccagcacagcaaccacatcgcctttcttcttttcggcaaaaataaggaagtgccggtttgaaattgtgggaatctcaagcacgcgatctgactatagttagaacagacactcgacaaccatcaagctattacttaccgcactcaggatgacgtcctaccaaaaatccacctggcgacttagcgctcttggagatttgggactttttccccttggctttggtagtaccatcatcattaccgcaaccattgcgcgtcctcagcacaagtgggccattccccttctcatccagtggtagcaggtagccccagaccccttcagcgtcctcatccttcacatcgtccgcgaatgctctgggtggatacacgaactgtgaaagcgcctgagtatcctctaatcctggcggcgaggaagtcgcgtgttcgggttgggatgagatttgttgatggctgttgcgcggactttcggggggtgtaacagtcacctcattatgagtttctgtggtgacagattggggaccggtgactggggttggcaagtagttcaagtcgactggcgtgtctcgcggttggacctgactcgagattctttgagagcgtcgaggtttcttttggtcttgtgaatctgcatcgatagtagcctatagtaacccctgtaagaaaatgagttgcgccaataggaaaaagaacgtacccttcctcgcttgagcgagcttttctcgcgggggggcataatacaggctattatcaccctgactggagagggctccagaccaattagcgatagttgtcaattcaacggtaggaacgtcaataaagacctttttcgatgccgtaaagaaaatacacaattgtagagggagaaaagaagaagtaacgaagaaagatatgatagtctatagcatgtttgggggaaagagacccccctggtgactctccgccccaaaattgacgagcgcgaatatgagaagtaaagatatgtttagatatggtattgaagctctaaaaccattgaatctgtaaacaatactgtatataatataatacagcatagtatagtatagtccaactagtatacttcatgtcaacaaataattatgttgttcggacctaacacgtgctgtcccctgacttcattcttcggctttccacccaacctttaggcccttaagtccttcacaatggacgggtatgtgagattcttcaatgcttagaggatcatgctaatggacaatcaaagcctttcaggtggaattagacgtttcgcttttgaaaagctcgctgccttggcagttgaggcgcctgtcaatggatcggagcttgctcgcctcgcggagcagtctcagtcgacctccgagtctgatggcgctctgaatgaagtcttgagacaacaggccccgacatcgcaggttccaatggtttgtccctctattgctgccgacccctggtagtgtagtgggtgcaggctaacgtttggacagggaatccgtgaactagatgtcctcctggccctatgcaaggcggcctcctccgtgaacgatccagaaaatgctgctcaattggcattccaactctcccggtacctgccagaatctcacagccagctattccggtcctcgcccttcctccatggcgtaaagccgtcgccttgggagactctcacgaataacctggctcttgcgcttttgtcgttaggaactaaatatccagacctgcgacagacaactctggaagctgtgcacggatatttgaacaactgcgccgaggctatcgctgcggtcacgccttttcaatattctagatctgacgcggggcgacagggtgttatacatgaatctgttaccgttttgtcaatcgccgtttcccttgttggatttatggaagcatccgcagaatacacttctatctggcatgcgagcgaaaagttacaggtggtcgatcatctgcgagcgatgctgtccgagcctttcctaatcgcggttgagacggcttcgtccactcttcgcaatgcaaacgtcgcggagcatgctttcagagactggagaaaatatacccgtcgatatgctgctcatgctcgcccattaggtgctatgcttgtacaagaaggctatatgcgctttgtgaaatcatgcgcatcctctctgatcgggttccagcacctaactgatgagcaactcttggatgactacatgactggcgttgggattgccaaaagttatgacgaggcggatatctctctagtcgaacgcgtgacggatatcattagtgaggaaattcacttgctagaggatggctccgactacctgcaagtcgggtctccttggcagcagcaccttgccttctctgttaaggggcatgccctagtaggtttccttaactgcgtgattcttggagaagatgcaaacaacaacgaaatactgctatcctggctcgaagatacattgcttgacccccagcaaatgtcgaacgaggaactatctgtgacggttctgaagtgtaccgctatccttgcaaggatgtctccaaatggtgcgtctattggaagacgctgccttttgaggtttctggcccaggggggtgtctcggctcgctccaccgttgccgtcgcttctcggtgccttgctcagatattgactattctttccgaggacgctgtaatcactacactttattcacttggtaatgcgataagcccgagcacgaacgtggaccaatctagccaagaccaactcgttggggatcataccgggcccgggatgaacctcgagacatacccaaaaaatgcaagccagacttcgctctcggcaaatggcgaagatgacactatcacctacaggaatgtcattcatgccattgtgacagttgcgactaattgcaacgatgacaaaatcagtgcattggcccagtctatgctgctccaaaagattggcaagctcaatgtcgcagttgatgcctttatcatccaggaaactgctgttcttgctttgagtggcggacaagccgagttccagcttctgttgaagttctatgcacgtatctacctagatggtgtcaacaaaggactgagcaccatctctgatgctgtccaatgtgccatggtttacctgtcgatcactttggatcaaaagtcaccactccacaggatttatctggtccatttattggaaagcattatcaacaagggtgatgtgccagactttgagtatgagcggcacaaggaaattgtttttgccgcggatgatatcacccccctcttgaaaccactggctctgctcgtgtcttccaatggcagttctaccgggtctgcccggtcagagtacgatgaagccattctaactctgttccgagatgcttggttcaatatcgccatccatggaatatccctcagctccagtgttgcccagcggcatcacaaggaactccgccttctcgcacatcattctccacctttggtggctgaaaaccacatggactctctggagagcgatgtggaattgaacacggtgcttagacgcgggatgggaccgcagcgaggcacggaacagaagagagctttgatttctgaactccctggccgagaatctgatatcaagaaattggactattcaggagcagtgtttcttaacgctgtcgtcttgatcgagagcctccgcgcctcctcaggggactctaccaagacgcttagttatttccttgacccagccttggccaccccggagatagttgtgtgcatgaatgctgttgcagacaaagcggttacttgttatctgtctcttacactttccggggagcacgatgacttttcgaccccttatctgtctaagcagcttgccggattcctggtggcttgctgtcatcgtattgagagggttcagagtattgcaacgcaatgtgccgacagaatcattcgtgaatgcccttctgcattgtgcgaaaagcattcgctctttgctttgcttgagattttgaccgtcatgtggtcttcctgtcttcaaggagaacttgatgagtttgactggaagccgtccttggtttctcccatgggcattgtcaaggtcgaactgcccgacaactatgcgttgagaagagcgactctgaatcggttccatgaacgagccagaatctgggtgacaaccgtcctaaacattgccccattagatgtcaaagggttactccagacctatctttccgaatatgacgacgacggcggctatggacacatttcgatgggacgttcattcgctctcgagatgggttcccttatcccacaaagcgacccacggcttgggtcgatcgatggctacggaagcagcgacttcaatgtcgcatctgacttcatggcactatatacgacacgccagaagtaccgacgtgcggacatgccttctctcggcggcctaggagggaatcttgatagcggctatgttgaacagccccgcgttaatgttttgtctgagtctgccgattctttggaagaaaccctctctcgtctatatggacggagcattgctggtgaggatattccccttgtggaagtgagagatgtccttcggcaggctgcgggacttatttgcagcagcagcaagccacgactctctgtggttcactacttggttgctttgcctttccagattttcaccaaggagatagtcaagcttggtgtgtctctctggcttggggtcattcacgagaacccaagcactgagccacggatcctttgtgaggtgatagaggcttgggagagaagcatgaagcgccgtaaaggattgttcgatcctacctttgaatacattgacccaatgtatactaagattgaacttttgccaactgacaaggatgttatgcttcgtacgcagcaaaaagctcaagacactctctcgccgcacctgcgagttctacatttcttcgagagccatttcaatgccatccgcctaggaaacctgcaagatcaacagctattgtgtcgcttgattggtagtacggctgttggactttcaaagaccggggcccatccattggcaagagaaattcatttccgcattgtgctccttggtctcacggtcctgaggcatttcagcccccgaaatagtggcgcatcttggaaactaaaggatcggattctgtctgctgctttgagttggtttaggcaccctccaaggtggtcattcggaggcaatcggctgcagattaaggcagaggacaaaattctcagcgaggtgactgcggctttacgagctgtggcaggtatcgctgccaatgcgcaagggtcatgcaaatctttgcaagccaaacaagacctgcttcaaatcctcgtggagaatgaacgatcacgccttcgagtttggctcttccccctggaaccggaacgaaagcaccatatgccttcgattggtggcaaaaatctcgatgacggccccgtatctttacttcggcttgcctgggcggaaaatgcagggttagctattcagatggctgcccggttcccgtcacccaaaatgcaggctgatgttaggtcgctgatactcaatttccccgagaaggtcattgaggagccaagcgctctggagcttatgtttgacaactgtctgcctgctgatgtcggttctcagttgaaatacatgctatactgggctcctgttactcctacggaggcgatcacatacttcatgcccgcttacggcaaccatccttatatattgcagtatgccatgcgggcgctggaaagctattcgatggatgttcggttctactttgtgccacaacttattcaggccctgcgctacgatgctctgggttatgtggaccgctatatcctcgaaacagccaagttgtctcagctgtttgcccaccaagttatttggaacatgaaggccaattcctataaggacgaggattctcagattgtaagtattgggattgtcaacttggtcaccgttagctaacatcctgtttcaagccggaccctatcaaaggaacactcgaccgtttcctagataacttgatctcaagcttctcgggcgaagagcgtgcgttctatgagagagaattttcgttcttcaacgaagttacggacgtctccggcaaacttcgcccttatatcaagaggagtaagcctgagaaaaaggaaaagatcgaggaagagttgcgtaagatcaaggtggaagttggagtgtaccttcctagcaaccctgacggtgtagtcattggtattgaccgcaagtctggcaaacccttgcaaagtcacgcaaaagcaccttatatggcgacgttccgcatccagaagacgagatcacgattgattcaaaaggccgaggccaacgctggtgaccatcaccaccagcgccaattgacgaatcattccgagcctgagcaggagacatatgaagtgtggcagtcagccatcttcaaagtcggtgacgattgtcgccaggacatgcttgccctgcaaatgattgcggccttcaggagcatcttcaccagtgttggtctagacgtttgggtctacccttaccgggtgacttcgacagcgcctggctgtggtgtgattgatgtgcttcccaactccatttctcgcgacatgctcggccgcgaggccgtcaacgggctctatgactacttcgtgtcgaaatatggaggcgaggactctatccgattccaagaagcgcgcaccaacttcgtcaagagtatggccgcctactcagtcatctcttacctgctgcaattcaaggaccgacataacggaaacattatgattgatgacgccggccatatcatccacattgactttggattctgcttcgatatcgcgcctggtggcgtgcgattcgagcgcgcgccgttcaagttgacctcggagatggtcgccgtcatgagtggaacccatgacccagctcaccaccagggtggtaactcgggcattaacctgccaggcagctcccacaacccaaccaacacgcagccataccgatggttcgagtcgttagtagtgaaggcataccttgcatctcgcccttacagcaccaaactgggcaacattgtctccctcatgcttgacagtggacttccgtgcttcaagcccgagactctgaagaatttccgtgaccggttcgtgttggagaagagcgagcgcgatgcagccgagtacatgcgagaacttgtgcgcaagtcgtatatgagcgtgtcgactaagggttatgatcagttccaactgatgaccaacggtattccttactaagactatgtagatgttgttttacacttacacaagacattttctccataaatatataatgcattcatcatgttctgtcactttgcccgaagtgtatggttgacgtcacgacttcgccggcgccacggcgtactgatcgggccatccataacacccctgatatcagagataatccgcaggaaataggatagaagatatactaatgaaaatgcactgtaaattcggcatatacagttacctcagcaatgatagagatacctcatatataacagacttcagggtggcacattcaaggcacgaggatctacacatcgtggtgccggaagtggcaagatgacgatgcgaaggcactggacttagatcagacctttataatgtgcaagaatccttgagtgcagtcccaacatcgaacctggatacatggaaattacatattcttactgtatataataaccaccatctcccatctcaaggatgagaatctcattcctcaataagctcagcggtggagggacagggaccaagtccccgccattgacggacctgtcgggagagtcagcgatagcggatcgcgaaaagagaggcagcaacatggacgagtcgcgtgtgccatgggtgacttggagatctgtgttgctaggcgcatttgtctccattggtggtgtcattttcggatatgatactggccaaatctcaggctttttggagatgaataacttcaagcagagatttgcgcagctgaagcccgacgggacgtataagtttaacaatgttcggtctgggttgattgtttccctggtgagtctttgaaaggcgaagtcggaagatgcgtgaatgtggcaaaagctaacgctttccagctctccatcggtacattgataggagctctcctcgccggaccacttaccgatcgaattggtcgaaaatggtccatcttcttctggtgcatcatcctccatgtcggactgataatccagatctcctcgccaacaggaaaatggtaccagttcatgatgggacgattcataactgggttcggtgtgggagcctgttcactgctggttcctatgtaccagggtgagattgcaccacgacacatccgaggagcgatggtgtggtaagtaacaatccaatactcaacattgcaagatactgaccataaccctaatacaacccagctcctaccaattatttgtaacattgggcatctttgtcgcatattgcatcaactttggcacagaaactatggacagcaccgcatcgtggcgaatcccacttggtatcacattcctgtgggctctcgtccttggaataggtatcctcctcttcccggagagtccccgcttcgactaccggaatggccgtatagaccgcgcccggcgcaccatgtcgaagctgtacggtatacccgagaatcaccgggtgatcgtgcatgagattgccgagatccaggaacagctggatgccgaggagggggcgcaagacgggatccgcggttggcttgagatgttccaggcgccgcgcatgacgtaccgcatcgtacttggtgtagtgcttcaagctctgcagcagctgaccggtgctaactacttcttctattatgtgagtgttttatttcgacatagacacccgcactttgctaatatatatagggaacggtgatcttcaacggggcagggatagacaacacattcgtgacgcagatgatcctaggcggggtgaacttcggcaccacattcggcggactatacgtgatcgagcacttcggacgacgcaagtctctgatcgcaggcgggatctggatgttcatctgctttatggtgtttgcgtctgtaggccacttctcgcttgacgttcagacaccgcggaacacgcccggagcgggcaaagcaatggttgtatttgcgtgtctgttcatcaccgggtttgccatgacatggggcccgatggtatgggcgattgtggccgagctgtatccatcgcggtatcgggcgcgggctatggcgttggcaactgcgtcgaactggttatggaatttcctgattggattcttcacgccgtttatcactggcgatattgactttgcatatgggtatgtgtttgctgggtgcttgttcttcgcggtgattattgtttacttctttgttatcgagggcaaggataagacgcttgaggagatggacatgatgtatgttatgcgcgtgccgccgtggaagagcagcaagtggaagcccccggagccggagaatcagctcacgaccgatcagcttatggatcggaaggttgcgaagaaatttaacaaggaagaggaggtgcctggacattcacatgctgagactgcgaatgatgctggggctggaccttcgcatttctcttgagagttggccttgggtgaccttggggtgacacgaagagttgaagtggtgggctgtggcgggctgtatatggaccgaaggggcaatgaacatactttcagtgtatatactgaaaacaggagatgtagagtacttcaaaatgtagtccgataatgagtgaccaatgggtgtcaatttggtagtcataagaataaagtcatccgcatcacctggatgggatgggtatgaaataggctcaaatatatgaaacgctgatcccagagctgaaaaaaaaagactcaaaagttgatgacgctccatgaatcaattttttttttatacatattccacctattttcaaagaaaagggttgggaagacacatcgagaggatggagaccctagaattgatacaagtctgttgagactttcgacgtcaaatgcagaaaaagtaaaaagaagccagaggaggcccagcagcaccgatcgagatatacttcccttgaaaagtgacgagaaccaatctctaatccataaagtcacccctcaagatcttctcctggaagaaatccggcttattctgcttaggctgacggggaatttcccggctaggctgctccatagatgcgatggaagcggcacgctggtggttaccattggaacgatgtggggagacggggccgccgaaggaaggggcacgcccagcacgagagcggagggcctctgaccagttaaagccttcgcctaagggtcggcgtgatacgttagatctctcatccggaggcgaggttggagtacttgcggaagatcgggtggtaacgatggccgagccggccggaggggaacggcgcgggcctacggcagacggaggggggtagtttctaccatttcctatgctccctgcacgagaatcacgcagagcttgtgcaccaaaggagacgcgtctcccgaactgcgagttgggtgaggttcctgttatttgctcgtcgtcgacagcatcttcgactggaccgttggagcccattgagctagataggctgcctcgacggaagttgcgattgccaccgaaggcggacgcctgggtgggagaaccagagaggcccagcgtgttgattgacagccgacgctggttggattgctgacttggaacctgggttttggatgggttgctcggcttggagaatatgtcggcgatggacccacgacgtcgacggttctccgcatgggggaccgagatgggggaggttggatcgttggacattgtcaaaagaagggggttgaaccgagagcaggaatatagacggactagccgcccttctcatataatagaggatttgacaatagagatcaaagtgacgagaatgatctcagcacttggaagggtggggagggtggaacgatgtggaacgatggtggggggtgttgatttgaggacaagacaagattgaaagattgataccagaactcgaacaaataaaataaaagaagggagaagtatctggagaataagttgagaaaaaaagaagacgagaaagcgagaagggggaaatatcgaggttcaccgagtagagagagctaagcatcacattatctggggaaagtggcgctaagtggagtggtgatgtcgatggctgactcagcagtttctatttcatgacatgaggttattctatcagttattttatcagttaggtatcagttaggtaacagttaggtatcagttaggtattggttagggtattggttaggttattagttagggtattagttagtcgattggtttggattgattgttcaactgcttcaattgctatggccatctgaagatgagtacaagactatatatattggtacttcatgtacctattacctatataacgtctacaattgggttatcgtgcagaatgacaaatgctaatccctgcagaaataagggagagcattcgtattcgtagctcaagaaagtaaatatggacgtacatcgtgtattgcttgtttcccataaagtggcatacgtctctgattcctattccagaatgaatcccctctgtcgacatctgctatcataaatcatagaccatcaaagaagctcttgataaccgcaggaactaaagacagaggagatcatccacatgataagaaatcaggaactcaaggcaaatgaaacaactgaatcagcttacgcccgatcgttggctcaatttcggtaccgtcacgagcgattttgatttcccgattcgcattccaagggttacgaaggcctcgagtgcgctggaaaggtactcgctctgtcgaaatccattgaatgcggaacggtttgccaaaggtttgaccctcttctggatcctcgggctcgacgcttttctcgctcgcattgtcgttctcatcttccgatgactcgacctcccagaagatagtaccccgcactgaatcatcgatgattcgtccttggggcgctgtcgaagttgccgctgtcagggtcacgtcaagttcgtcgggcccgccgggcgggggatcgggccgagatggcatctccaaggccagttcttcgtcgtcgctgatcggcgacatcatacgggcgtatccaaaatattcgccagatttgttggcggagaaaattaaataaacgtaatctgtgttctgggtaaaggtcagtttcggtcattgctgggctacatagctttggactcacctcgaaagcctgattcattgccgcctcgttgtgcgactgtgtagcccaaatgccactttgcttgctcaactcgagatcctccactgtcaagctcttaacaataaagtaccgatctaccagccgggccgggggaggatggttccccgtagcaggcgctgcggaaccgggctccggtgtgattgaatggtcctcgcccgggtccgtagcagtagtcgtagcagtagtcgtagctgtcgtaatcgtagtcgtagccgtagcattatcctccggacgtggtcggagagcattattcggagctgcagacccggagcccggagcagtgagcccctttcgcagtcggcagacaacgcggacgccctgaaatcgggagtcgtgaaatctcgccaaagctgcaacgcaggcggcagccgacttgtaattcacaaacgcacaattactcttggagatcaggaacacgctctcaatgtcgttttttgcatcttgcgagaagtgatctttgagatcaatgacactggctccgggaggaagatttccaacccacagcgcgtggccagattgcttgggctttcggggtggtcctcgtggggtactcggagcggtcgggagtggttgcgaagggggagtattgtctttagatgaatgcaggttagtaacagttgcaaagtgaggggattcgacaagagctcactggagaacggcggttgtggttgggactgcgctatttttttggggttcgatccatccacgatggtctttgaaacgtcgtactccagatccgtcattcgtttatcggcttctttgcgcaaggtgaccggtttcgagggtgaactggtgttagtacgtactggagatatagcctgaggcatttggccggcaggcactccatgtccataagggccgtatgatgaatgagggtaatagcccgagctatacggagatacttgcccgggattgaggtttggcatgttttgcatttgggttccatgaggcgggtaatgatgttgaggttgagggccagggtgttgagggatggcatacggcggataagcagggtaagacatgccatacggcatgcctccggagttgtgtccatacggagtcattggcatggggtacatcatgccttgcccgtgggctgtgtactgatgcattgactgcggattatagccttgtggatgatggcctgggaagttgtatcccatgaccatatttaagggagagggggcggttccataccgagcttctgcgaagctggaatgatgtgtgacattgggacgtggcgctgaagtaggagatgcacctgagaagagatttagtcaggcaaagcttggacggcatttgaaaaggaagggctaaccctgttctgatatcggggctgtctcgtcagctgtcttgtctgaaggaacattgcccatggggccgttgatgaaactttcaattgtaaccttctgaaaactactgggtctttagtgtctgtagggaatggacacatcttactcgagaccttttccttacctaagtcacgtagcccggatgtcaccgcggtgtaggaattcttatagaaatcccaccgacgcaagtaagacttccctaagagtccggtagaatagaacagaacagaacagaacaccgtagaagaggggaagtgcaaagatctaatccgggaaggaaaaggcccaagccatgcaagttagttctccggattttgtgaagaaaatatcaaggatagaatgtgtgtgtgatggtaagaaattgaaaggggaagaaaaccggtcaacacggactgacccccctcctgttaggccataagccgaagctcacaaaacaaagtaggacaaacacatataaagggattctagataagccacggtggacagtgggctaggtaccagagacaggggaagcttaaggctaactgacagccaacacatgccagaggagggggaagaagtgctaggcatgccagggaagagtactgaattcaggtacattgcgagaacaggagaccatccccgttaaaaagaagggtcacataccgagtaatttggctagtgttttgtttcaagaggcgttgtgttactcgacgatggtctagacagaacctgtttttgggccaaatgggattgagaacaaaagagccgagggaggctggtgaagggagctaaaatagtgtagaatcgagggcccgagaataaaaaaagcgccccgggagtcagatatagggcagaaaaataaagatgcccaagggaagctaagggtaaataagagaaagttaacgttgcagagggatcttgttgatgggggaggtcctgatcctggccctggggggattgaagccaatcaactcttcttggcaggctgtggctcaatggcttagtacatattccaaggtataaaaaaagaaaagatataaaaaagaaaagaaaataagaaagaaaaagcgggatgtgctcgggaagtgtatactgtatatagcatttagagtcgctaatatagaactgggctatatggtcgaataggagattgggcattattctgaaaataatttcagaacgaggatcatgtcattcgagcagctgttgccgtatccctgagctgcaggttgccgtcttttttttttctatttttttgtgtcttccttttttcttttctttttgcatcctgtgatgggtatctgggcggggccagtacaatggtcgcgattggggcatattatgttgggcgtgaaaaaaaaattggaatgacttacacacccgaggagcctcttcgactggaaccaatcgaagtgagagacacaattgccactctcaggggtgtggcgaaagagtcgagaaaaccgcccagggcgaatggtatgtatgtatgagtgtgttccgtgcaacctgtacaacggtacaacggcacaacggtacaacaggtaccataggtacctatgtatcatatacctcggaagggccgaatgagccctgggtccaacggcctttggaaccgtaagaggaaggcaataggaggagctctggatacacactcctactatcatgattcgtagatgttccaatgggatgtttcacttctttgaaacgtagatattggggatacaatgttgtatattgcagtatttcgagttccagcccagtccagaggtaagagcgacatcgtgttgctgtacagtgggacagagcgtacataattggctcatcctgcccatggtaggacctcgcatacatatgtatgtacctcgacaaggcgattatgtactttgtatgaggtagtattgactgccgtttcagagtatatgccacggaaacgtacgtaccgttgggtgggggtcaatggagcttgatgatcctgtaaaaaaaggaagaacatgaatctggacatccagcaagagggaaacttcttccatgggaattgagccaattggaaaaagaaaaatgacgacagaagaagaagctaaagggacaaaaaggaagtgaagtcggatccacccggtttgaccaccgggatcgcatcccagccaatcagagcgggctattcgagactacatacatatcccctaaacaagagatagcagagaatggtactttgtagagtaacggaatacggggataagagcttatttatgtacatatatagtacaatgtatatagatatatcgtatatacactcagggtatgttataatttggctcattggacctatacccgcggactctttctccaaatcaactgaccagtcacttgagctgttcttaactgggtcatgtgactcaccagctctagtggagtactccaattgggttgtataacccggagatttcccgaaaacgggcattgacagtctctaatctagagaataaaagtacaattcaacttcgatcgaaggatgatactgacgacagtggagggtcactgacgcagctttgatgtaatggcacccatcttccaaaaaggtactccggcgtgttccagtagatataccatgttttgatgaagaaacaagccacgtccggacggttagggaattggcgatcagctcaaagactggacgccacattgacacctgaggcgtcactatggatttctgacgtcatgggcgttctccccacatctccatgctttctatactgatctatgagaatcataagcccttctgtccatggacgccatacaggggctttcaactgggaatcattcatcgtacgtatacaccaacacccgccagtcagacttgaccgtcaaggccgtgtcaagagagcgagttgacccattctataatatccataacgcgttatctattattagtggctttgtggctgtgctcctcccactacaaaaaaaaaacacgacgagcccaatcacggcagggatcagcagggatctgagtagggcgtctccattccccatccttcatattgtgattgaccgagagcgaattgttgcaatgtatcgactcttcacagccaccacatctccacctccacatctccatatatccatatatccatatatccgtctcgatttggatgtagtgaaaagtaggtgcttacacttccgtgtagaaaattgcaggtcttaccttcctcgggcacttctagtcgccacagccccacggatgtgcagtttcaactctatgatcgagatttcgtcagctgctggcggtcaaagtgtggaggcgatggttggtgttgccactgttaggtaactggtttctgcatgaccaggattgatcactgtgatatgtagtagatccgaccgaggtttccaaagctcgaaaagtacaagtctcccagaatggagagacgaaactacacatgataaaatagaatgatcaaaacgcagggcaaaggcaacagacccgactcatatttgaatttgtcttagaagacaataatgtgtgaaagtggtacgcaaccatccaaaagcaggattgagctgctagtatcaagaactgacatgaagaagtgaaaaagaagagaaagaaaccaccgcctggccctcatagaaccaaagggcgaaaaataaatatcctgaccatcaaaaaacggaaacaaagagcggcaggaaaatcaaaaaaaagtcatcatcagaggggaattttcatgcggaatctcattaaacactgatataattacgattacgggcggcgcggctgatgtgctagacggggagggtatagacaagatgaagcgcggggaggagccctttatcgatcaattccaagtgaagccacttttcccgcaaagcgagcgccagcgcttcctcttttggagagcttctctctgtctttgtctctgctgtctgtgacagttgaagcgtttgacgaagaggaagactccttgctgcggatagttgggagagagcccagggtatcgtttgcgtaggactttccacctagcggcggtggaggcacgctgaaggcagatgtgcgggcggtccgttggctgagatacagcttggctgcgggggagagaggaatggaaggaggttgtggcgggatctcagcgccgttttggactaacagctcggcgatagggaatgggatggcttttgcgctagatctcgcggcaagagtggttggtggggcgcctggggacgcaggatcggctgcggcaagggctaggaaggttgcgtgagtgttgcgggagcgatcggttatatttacgttgccacccagggcgagaccgtagaggacgccttggatgtcgttctgtttgattgacgcgaggagcgtttcgtcggccgtcgcgaagcgagaacgtggtgaaggcagattctcaacgtaggctcgatcaacatatttggcggtgatgaatttcaaccgttgctctcgtgtagaactggcgctcggcttgagagtttgatccaaggtcgcctcccaaatcatgttgctaacgcggttgccaatctgcaggagaatctcgacgatatcattcgagaaggaatgtacatccaatgtgagagagcgaatcttggatatatgcgtgcccagagagcggtggattccactacattcaatgcagagaatgattccaaggttgatggagacccattcaactttggatgatgatccgcaatcagcacaccagttgttgccttgatccgcatcccgtacaacctgcagaagctttgcaggattctcttcaaagttgctatcaggacggacatagcttgggcgcgcaccgacggttgttcggcggatgacgccagcgttgctggctgagctagaggaggaatgggagtggtgaccagacacagacgagcttttccctgttagggcggaaccaatatcccgactggtaggtctatcattcctagatgcggagggaggcggagtctcctggccttcaaccgcactctgcagcgcgttgttgatagccctgatccaattggacatgtcgtcctcggatgtcgcttggtaaatacgtttgaactggggtgtgatcacttcgaaacagaaccgtcgttccgcgtttcgagcttcacggactgatgccatgcgcagatcgatggggtccatgtgtagatccagcttttgtttccagttgctatactcggataatttcccttgatccaaaacaatccaaaatctgataaaattagaagttgtacaaccattcctgcgcttgtacttacttgtgccatgcttgcttgttgatacccttcggatcgatgtgagatcctggacgtgacagtgcccacaaaaggccttctttgcgctgttggctacttgtccgatcagatccgctgttgtgctcctcgagatcccggatacccttgaagcgattctggcccacattagcagccaccgtcgagtttgacgcgggtgcactgattcctgtagctggtgcggccggtcctgcatttgcttgagacgaaatcgatgaggtgttgctaatgactcctcgaagctgagagcctgtgctatcagccctaccaagctccacctcggtagaagggccgctattggcagtcccaggagggataggaggcacactagttgtaccaaccactacgtcgggctcaagatatgggttactgccattctccagagcccggcgcttctcttcgcgctctgtgcgctggaattggaactccttgtcggcctggtccacctcgtgaataagagcttccagctgaggggtcattccttcaacctttttggcggctgacaggaaattcttggcctggcaactcgcatatttggtgagatgtgagagaacctcttgctctttgcgacctccatggagatcttgcataaaggaggagtaatcaaatcgcctcagttcgaaatttcgccgcttggcttgatacttcgaatcgctctcggcacgcttcttctctttcagcgaatcctgtcgctggcccaaataccgactgacataagcgtaatagtcgcggctctcttcatcccagtccttctttttggcttctgcttgcttaatatcgttgttgtatagtttgaccagaggatcaatcaccagtttctgaagttgcaccgtgttgagctgctcgtagttcagaatttgccgagcaattttctcgaagtaatgatctaacgcgggctgaatagcatttgcattagacgtagacgcatcattcaatgacgttaggaactgttccatggcctcattgcaattggcttgcgctagctgcgcgctctcggctttcttgagcaccttcttgattttggttcgcatgttgcttgtcttcgactctagcgctttcatagtcgcccggaacaatggtccatcctccactccgctcatctcatcacctgcccgcgaatgtgggagatctaccttggctggtggtgggggaggaggcgcggacggcgggggaggaggtgggagagacttctccactggctcaggtggagtgatggatggattaacggtcgattcggcatcgctatagtgagatataacggattgagtcgatgaaatccgagagcgcggaaagacgggtaactccaggtgtggcgatgagatctgagggctcggcggaggacgcaaggagttgtgcacccagaaggaaaaatgggcgagagtgttaaggcggtttgttctttgatcgtaatccaagaagctgcagctgttgcgccaaccgccacctttgtcctctgttaccttcggaggcttccatcgccatgaccattcgaacgacacggacggggtacccccagtggagtaatctccaatcagttgaacattagagttattctgaaggttagggttcgcatggaactctcttgtgatcagattatccagttccttcgagttggatgcgtgagcgaacgtgagtcccgtgagactagtgtctgccacctcgggcatagtcgttgaaacaccgttgacagagtttggagcattgccagtcttcatctgacgaatgataaaggtaaacttgaagatcagctcctcgtcgttcgacaggcgtagcatgaaggtcgggatcggagcggtggagggggtgtcggggtcctgttcggtttgaggggacttgttagctagaagacccgatacatgatattaggtaccgcgtacctgaatatattcgatcggagtatcgtcgccagcatcgcgcttggctacgaaccttgccgccgggaacgcgttgggggatagagtcaaaagacgacgtcgtgagttgcttatcgtgaccgatgcgatcgcgactattgaaatttcatcagcatatcgacaagaggttcagatccggtattttaacccacaacgattctgatccttgaaaaacaagttccccgcatcgtcaaggcgggtggcaacattccccatgatggcaaagggatcaggtcacggcgcgagaaagggaccgaagtagcgggaccaatcgttggccatcgacggtctgcgaacctgtagtcggatggcctttgtattgaagtgtgcgaaggaaccgagtaatcattcagtgaaggtgtctaggggatgggagagagggcgagctcaaagatctgaaggaggggcgaaagttgatcggataaatgcgcaggcacccgaccccatatagtgccatttagtgtgaagcttctttttatttaaatattcttatttggtttcagttatatagttcgatttgtatctgttatatatcatttaatcatctgttggtttggacttgttcaagggcattatttaacaagaacatctaatgcgactacatccatataactagatataacacgactatagcctcacttctgactcaaaatgctataaatataggccaaacttatattaataggatcaactgtacaaatcaagaaaaacaacctggtatgaaaaattaatcgtgaacgtcgtgagactcggttccaaacccgagacccgggaatagaaaagaagagaagaatagaaaacaaaaaaatcagggcatcagctcgcgacttcgcttgtcccatgattgggttcagtgggaatcgcaccagtcgaagcagggcggcgctcacggccagagaagtaccgatgcttgtgcttatggccatcgggcttttcatccgcttctacccaccgcattacctgtcctcgtagatcgcgcatctcgtggactcgtctagaaagatctcctcgtttcttagattgaccactgcgctcattgagctcatcctcttccgagctggagattgacagtgaagacgcgctgctctgctgcaggaacgtgatgacatttcctgcggtcttcttgaattcgcgctgctcgttcttcagattttccattcgttccgcatccgcctggcaatccagagtggtaacgtggagtccggggaagttggaggacataaattcctgtaagagtggtagtttctcgccgttgggacggtaagttccactgtcgttatcaataaagagttcataatcccctggattggttgagatagtgatcccttcttcggtttggcccaggtcctcgccctcgttgtggtgctcatcttcctccacaggaaactcgtctgtaggcaccgtgctcgattctgcgttctctgcattacctgcattccctgcacgttcttcattctccgcatattctgcattctctgcgcgctcggcacgcccttctggggagttacggcgatggcgatgcttgcgccgccgaacgaagaattcacccgaatacgcgatgtagatagacacgtcactgtgcatggtgtgcttactcagcatatcaatgccaaattctttaccggtctcggtgaatcggatttgtccgtccaaggtgagcacataggtgaagatccgtccaccctggccatagtgcgcaaactccaaaaatttctgagagagttcacggcaaggcctttgaaaggacccatacaaggtagtacgatcgaaattgtagatgcgctggtgctgatgatggagtgttttatgcaggatacgccctcgtagactttgtgcctggaacattcccgccacgaagggcctgaactctacatagcgatggtatagctctgcaggtacagggcctgtgagttgcatctcaatagcctggaaactattcggagtcagtatatagatggcccaggggggaagggaaggaagacacacttgtaacgggtaatcgacttgccactgccatctgtgctttgaacatggtctttgatgccagccagtcgtccaatcagaggagaaaaatgtttgaaccaaaagttaggaccgatagtgtacatatgacccccctctgtgccgggggtttttccgagacattcgatgctgaccaccaaccaggactccttacggtgaccagtcgcaaacgcggagacattagtaaatacgtagacgcgcttgctcccaaagcgctttttaaccttgaaggacttctccttgaaacctgcccagtcgtctgaaagtgcaggaacgtcgataaaagcaatccccagcttatcgtcgtgatccgtgggatcctcgtccatgagatgacatttcaactgaaatcccgaagccggaacatttgcgatgatccagtcgcattcccacatggggtttatgtccctgcgtacggtcggagtgcggaaatgcacgtcggggtcttgtttgtggcgcgtcggtaggtcgactaccatatgcgcgtcgacataaggatcggaggagaaactgccaaagtccgcgacgggcaggtcttccgcgcgatggaaagtgatcttgagggtgtagcctggcggggcgtggggaaacggagtgggatcatagcctccggcaggctttgactcttcattcgtagtgagccggcgatgtatcttgtcagccttctcgactagtttggggccaaatttgtcgacgggatggacaggcaatggctggggttgggagtcatccatggtgagtatagggggggaaacaaacgtgggaaatctcttcccagagataaagataagtaaacctgaataatagtcatggaagagggaagggaagaagagagtggagagtccaagctttttcagccttacaaaatgaagaaccgtgtgagttccctcaagtctcccctaagggccccccaataaggaaagatgagcgcaaggcaacagagattataccgccaagcccttgccaagacctgcctagcggcaccggataacgtcattgggctttgtctggttcccgcgccttcttttcagggggtcccgaggtcagccctatattatgttgatgttgtgcatgtttacatatttatcttctctatcaagtaacttgaaatacattaaaggcaaaaaaaaagtaagatacccagaataagctagaacacatcataatcgtacacataccgaaataagaataagataataggcattaggtcatgagtatcatgggggaaaagacaactccttgcgcgaggactgacgaatgtggcgtataaagaaaatggtttctctaagttcctcggaagaggaattgcatgtcctccggggtcagtttttccaatgccgccgcttgatctttattcagggtaccccggatgaggttggccttcttctcttgaagttgaatgattcgggactcgacagagtcctcgatacagagacgagtgaccacacaaggccgctgctggccaattcggtgactgcgatcggcgctttgccattctgccgcgggattccaccatgggtcgataataaaaactcgggaggcttccgtgaggttaagtgccacgccaccggccttgagagagactaagaaaacctcaacctcgggtttagtcatgaaatgttcaatggacttttgccgctgtgctggggtcatcgatccatccagcatcacggtgttgaatccggcatggcgtagccgccattccaccagttgtagcatggatgtgaactgggagaagatgatagatttaggggtgtgacttttgcttcgctccttgaaaagttcataaaggagcatctcgattttggtggaagaggtccagctctccatggagatgcggttgatgatggaattcttcttgacagactcttcgtattcggcaagggtaggttgttccaaatcgatggaaagggcaatatggcaccgtgggcagtcaacatgcttgctatcgtcctggaatgactgaatgtagtccttggcacattgacgacagaattcatgacggcactgagaccgaatgccatcttctgcgggctcgtcacagatacagcatacagcaacgttgaaccctaattgcgcttttttcttcagaatgagatcgggatggtttgcaacttggcgcatctgcatgatcaacccgaagatgttggcatagttattcaacatgacaccctcgctgacataggtgtcgaattttcttgtcgagttcgtcataatgctgcgtgagaaatcttgttcgatctcaccgaaaaattcattgtgtaacatgatacgtttaggtgggagctccatcgacgttgtatgctgttgcttcatccggcgaagcatgatatgatcggtgatgagacggagcttttcgagaccctctttacgttgccgctgagttttcccttcaataattgggttaagaatctccttgttgaagatcgaaatatgcataaacccagtgtgagagcactcagtacaacgcccctctttagtcgaggtccactggagttgttcgcaatcgcactgcttacaaaagtagcatgcaaatggcttgacttgtagaaatcgcagaagggagaagaattctccaatccggttctgtacgggtgtgcccgataggcaccacttgtaattggcctccaaggcaaaacatgccctagcaacacccgtggtacgtgatttgatactatgcgcctcgtcaaggatgaggcggtgatagtggactgcgtggatgacactgtctgctttgaccatcgttgcaccgcgagagaagcctttctcctgcttgcggtaaatggattcgagacttgcgtaggaaatcatgatgacatcgtacttacgaatctcagccggcgtcaactttttgattttcgcgtccgagttgtggtagaccaagaccttcagcttgccatccgtgtattccttgatctcggatacccactgcatcaaagcgaccggtgggacgagaacgagggtcgggtcagactgggggaaatcggacatgatgagtgaaactgcttgaatagtctttcccatgcccatctcatcgcccaacaaaccacccctgtattcagtcttttcctgagctatcatccagttcaagccctctagttggaatggcttgagtttgcgagttatagagacaggttgcttggcttcctttggctggatgataggctgtgctttgagcacatcccacatggtaccaactgtgggatgcctgtacacaaggttctttcggtctttttctacctaggggatggttagtcatggaaggcacgtgggaaaagaaccctcggcttacacggcgagctttccgctgctcttcccagctcgggggcagatctgcttcagagtcgtgcagatcgtcatcgagaccgtcctcaagaggatcttctgatgtatccgaagaagcaacgccagaatgaagtaacccaggtggctcagggctcaacggagagaaggacactggtctagaatctgggtccgagtcgtattccaagtgttcatcaacgaatttgtctacgagcgaaccttgttctgttgtcgggcgcgggtagtcgtattcctccatttgaagggcatgagccagagccgcatcagaagtctcaagatcattttggacagacagagtacccataggccgttttaccgccctttttttggaggcatgagttagtgaaacatcggaggcaccagtatcctccgccagtgccgctgcggatcgttttcttcctccttgggaagctccaagggatagtgcgctcgactgtagtttctttacgcgatcagcggcattgatacgcgccgaagtctttatcgcaaccttggtgtcaggttcagtaactgcagcaccaacgctagtagccggggtactgcagcccgtggtcagattccccagcgaactccgggaattggagtcactgggcgattcatttttcatgggtaccaccacctcaatcctgcccgaagcagaattacccggtgtcaccgaatccacgacatagtcgtcctcatctgcctcggaatcttggatgacgcgagggcgagaacgagaaagggatgacccaccagctcgcagaggtgccgatcgacttgatcgacggaggggggatgaatttcttggtgacgtctcgctgaactgtgaatcatcatctgaatcagggattgtggttctgggtctcagattgtgcctcatattggaaccaagcgaatataaagagggcggtaatgagactagaggctggaaccgggcgtgggatctcagctataacgacagatctcattagccgcgttcaaaatatatagggaagtgacatgggggatgtacctagaaaagcgcgactttgcttgcttgtggtacgaatgtgatcagtcgctagacgacaggagatgggataaaagctggtataagccgcaaattagagaggtaaataaataaatgagagatcaaaggaaacaaaggaggaggatgagaagatggaaagaaaatgaaaggaggatgcagtcgggaggcagcaggtgcctgaaccagagaaatattttcctcggaatcttccgatgtccctttcagttccttttcttcttttctttcttggtggcaaatcatcatctccaaattcatcaagtatcaaaggtctctacatctctcttcttccgcataattccctcctattcccctgtcttccccatcgcccaattcttatctcagataagaccgcgttaagtgaaacgcgaaattgccacgggtccagtgactcgggcccagaccgacttggagcctcactttacaacctccaaatatgtgagtagtgctatcctttgtgatattatccaaactgacaagtcaaaaaggacaggaaggagacaggcaaggcggacaagagagccaaaccagcctcagggcattcggggcccgtatgttttgcttcccataaccttatccccccccagagactcactgcacacactagacgctctgccttgaccgactatcttgctgtatgttgatgttctcctacatattatgacttggctgactggttgtagtcaaataatatctcagcccaacaaattcgtgatgattgggaccgccggcaagccgaggcgcagcgccagcctgatcaagctgaacaagaatcatccaatgcagctgaagaatctaggtccccatcggtcttggagtcactagatgaccctataaaaaagcgcaagcgccagcaagctattgcaaggatcaaaaatagtaaggagtttgctaaacgcaaggctcgctttagtggcgattacgatgatgaggaagacgacgacttccttgcgctacagatccacgaagaaaagaaccggccgcaaccgggtcagcttgcaaactgtgaaatctgcgacaagcgtttcaccgtgactccctatagcaaggccggtccgaacggaggcctgctttgcgttgattgctctaagaagcaaaaggccgacgagaaaaaacccccggcaaagaagcgtgcccctggtattggacggcgtcagaatcaagctaatctacttgatgggttgacacctcatggaactcagagtctactggaaacctgcatcaaggtatgtacacagcattcaaattccagggaattgagcaaggagtgctaattgttccatagaaagtggcagattatatccatgatattgaggacttcggtgatttgcctccgtccttgctgttacggctcggtcagatcttgtctagaaggcgggccgtgacctcacgaaccttagatctattcttacgaccccagtacacatccatcgatttgttcgattgtgctagtaagtcagagttatttcctcttgtttgaacaaagaaagtctaaccagtggctagaactcggcacggatgattaccacaagatcctggcttccatgcctcgtctaacaagggtcaatcttcggtttaccacaccaatgaaggacccgatttttcactatatgatggagcgtaatatggagatcaaagatctccacctagatgggccaaaccttgtgaccgatgcctgttggcgccaacttttcatgaaacttggtcatcgtttcataagcctcaaactatggaacctggatgatgcatttgataacgaaaccgctcgagtgatgtgtcttcattgcccaaaccttcaaagactgaaattgaagttcttacacaaaatcgacaatgagatgcttgaggaaatttcgacgctcaagtcccttcatcatttgtcgctgcgctttctggctgagaccgacgttaagaccgagcctctcctaaaagtcatcagtagcattggacgtcagctggaaaccctatctctggaggaattcaacctcgtcgatgatcgactcctacagcatatccatgaacattgccgtcatatgaccaagcttcgtcttgctctcaactcgaccttcaccgataaaggtttagccgcgttattcacagactggtctaatccggcccttacctatgtggacttgaactccctccgagacgtggacatgacgaacccggccggcccggaagagcctattgggcttgcttccgacggcttcgtcgcgctcatggaacattcagggttgaagatccaacacttgaacatcgcctcgtgccgtcatatctcatacaaagcgttagagcaggtttttgcggaaggcaaaatgtatcccaacctcaaatatcttgatatttcctttagcactgccgtggacgactaccttgcacagtgtatcttccggtgctgtcccgcccttcagagactggttgtttttgcttgcttcaagattcgcgacgtccacatccccaggggacttgctctgatcggtaccgtgggagcgactatcaaaatcgacggaatcacccagagcgagacaatttgagcggcgctacggtggttcgacaatactatttttcctttttctctcatgtagtttggcgatattgcgatctgaatcaaaagtctttgaaaattttcaggcaaacttggttttctccctagaatcttgacaacttataaaataatctgattaatttatctcggaataatattagggacgttatatccaagatagcactgcaatagcttctacatgtctttttttcgtccctgaagctgtagccaagaagaatacgtgcggtgagaaacaactctttcatgtgtaatatatgatatgatgtatttatcaatgctcccgaggttgggacttgctaaatcattcatataaaggacatcattcgtttactatcatgtacatatacgccaaacaccatgatgtatgtaatcataacccatatatctcaagaaaatgcaaaccaattgacagaacccatgctctttatcccattctcttgccaatctcactctgccagtttcgagacctctcaaatccattggaggcggtctggtagtcgagcatcgcctggtaaacctcatcctgagtgttcagtacaaaaggtccatactgaacaaccttctggtccagtggctgaccagccacaaggaaaatgcgggcatccttctcggcgttatccgggacagagagttcaacaaagtcaccagtctgctcgaattgaacgtttgtgaattccttcacgatgcgagtggaatcattcgagccaaagacagtctcaccagccaaggtgtaagcaaatgagttccatccctgtggtaggggctgcgatatacgaccaccgggcttgatcgtgatatccaagatccagacaggggtgtaggccaagtcacgcacggagtcaacaccgtgcgactggcccgagatgaccttgatcttgacgcggccctcatcgactgtcgcgaggggaatctcctcagcgcgaagatcacggtaacgaggctcacagaatttcagcttctggggcagatcgacccacaactgcataccgacatttgggctaccgtcttcgttctcgtggggcatctcagcatgcatgataccgcggcctgcggtcatgaattgcagatcgccgggtccgatagttcccttgttaccggcaaagtcttcatggtcaacgccgccggacaacaaataggtgatggtctcttgaccgcggtgagggtggtctgggaagccagcgcccttaccgatcgtgaagtggtcaagcatgaggaagggactgaagttgcggagcttggcagttccgatagagcggcgcacacgggcacctgcgccttctgcttgctcgatggcaaggaatgcctgtcggatagcgcgagggacggacatgtctgtgatggggaagactgtgggcgtcggggtttccaggttcaggtggtggtttgtctgattgacaatgtttttggtctgaaggtgctctgacaggctaggagcttgttgctggataaatgagaccaaagagtccttgagagagtctttgatagaagggttataggcaaggaagattgctgtgatacaaattaaaagtggcagaagtagtttcatggatgagatgtggactatttatatgccaaagaagcgattgaaaagagaagaatgttctgctgggaaggaaaatgctgtcagcgttagtcaatctcataaatactctttgtagtatccatcctgggcatcgcaatgctttgcaagacatcagtcagcctggtccggccaatgagatggcgtggctttattaccaactttcccgtcagcagccgctaagcaaagagctagccagatgtggttagcgttggtacctgataaatgaggtactaatgctgagttcagcatttcaaatcaggtgaccttggaaattgggatctataagccatcagtaattctgtggatataagtatcgatatatgcgtgctagagacttccatacggagtgatttcatgagaaatattaaaatactcacttccttgcattctacaatatgtacatctgcttccaagtggtacaagcgttacgtcgggagcacatagattggtcgttatcagataaggccacgaagcagccgctctccaactgccaaacctgacatgcgaggaccgccttgtgggtaggcatttgattcattccagccttggaaaattgcttactcctgtctttatataattacactgatacccatatgcgattgatttacatgaaaaacccttaccattgccgaattgaagcttcttgcgacaagcgcctttcgcgaggaagcttcgggatacctgacttccacaacgcctagactccactgtcatccttggtccactgtgttctaatctgatctgttctaagagatgggtcactcagcaagcctggcgccgtggctggtattggcatgtgctgtgtctagcacgtgggcaaacaaaaaaccgttcaacattaatgacgatattctggcttatccccaggtaggttggatggatctgtcttgcacccatttaaagcaaacctaacgttggatattgcccatagtatcaagtgacattccccgaggagtatgtgcttgaatcccacgccgaagcattgctccgatccgaggccagccccggcgccaatgaccagaacaatccccaggtttacataggaaaggatagaacggactccaccgcccaacctgaggatacgaatgtatctctgttcacctacgaagagatgatactagagaaccggcgactcctctgccagatcccacgtgtcacgaacgacgaccataatacaacgagagacaaggaggatagcaaagccgaggagcaaaaggaactagctcgggcgacagatcgtggcctggaactcctacgtgaaatggaggggaaatgcatgtactatttctccggctggtggtcctattccttctgttatcagaagcagatcaagcagttccatgcgctccccgctggccgtggtatccccaactacccaccaatcgaagacactcagacgcattccttcgtcttgggaaagtttattggcgacaagggcgagggagagaaacaatccgcccagacagatgtggcagagcttcacacgcagggcggctcacggtacttggtccagcatctgcgtggcgggaccaagtgcgatcttacgggacgcgagcgcaaagttgaagtgcagtttcattgccacccacaatcgacagatcacatcggctggattaaggagctcaccacgtgctcttacctaatggtaatctatacccctcgtctatgtgatgacgtcgctttcctgccaccacggcaggatgaggtacacactatcgagtgtcgtgaaatcctgatgcctgacgaagtcaccgaatgggaagcaatcacagagtggtacatgaccaaccaagtagccgatgctgctgcggatgcggatgcggatgccgaccaagccagcctcccgattgtcggaggaatcgaagttggcggtcgtaagcttgttggcatggagggcaaggtaattgaaaagggacgggtggtatccgcaagcgaggagcgagtggaggtggtggtggttgcgaaacgcgagaatggcgaggtccgaaaaacgtccaagcaggtactgaaaaagtacgatatcgacccggagaaactggaagagatgaagaatctactggaagaaagagcagaaggcaaagactggacgctggaagttgttgaaagcaacggcgtgatcaagttccaaggcagctttgaagacgacgaggaagacactttgaacgacaagccttctccagagaaactggatgaaaacaaggtatctgaaagttcctctggccaaaagccaaagcaggaaacagagtcggtcgaaaagaagaagcagtcctcaaccaagcctgaaaacagcgagggtagcgaagagacctttaaagatgaactatgacatttatagtagatcttgtacattttgatgtcttattttttacaatcctcatatgaatgatattgtgtttattttctgcgattagctgaactaggaacattactagcctacctcggtttactataaatactcattctggacttcatgcgaaggtgcaaattttgtctaagagctaattcgtatcttacgtgatatatattacatgcaatccatttacttcagaggtactatccgagtgttttatgcttccaggtgtcgtgtataggtacatttatacatttaatagatgtttatacgcgtcctaattctcaagatttctactgtaggaagcgttctaatgttagatacaggcaatttgattacaacccacatacctccaaggctagtgtattaaccctatattaatcaaatatacagccgcagacgtacgtcagtagccttgcggagccgaggggcgctttggataaacaagtagtccggagtatcaaagaagtacaagacagataacagcaagaaaagaaaagaagaagaggaaagaaaagaaaaggcaaaagaattccactgaagagaatgaaaaaaccacatagttcactatagctcgaggcaacgtgactgtaacctccctatcgcctatggcccaccttcccgccctctccctctctcctaatccaacctcaccctcttctttcctttccccctctctcaatcccttgcgcctaacctttttctctacctccgcgcgccccgacatctgacccgtacccgcactaaggagcgccaaggctgaccgagcaacggacagcgtcactaattctaccggttcttcccctacatcactgcgaaacctagagctggcacgttgagacgctgccatttgcagcggactgccttcataattgatcgccgtaggaccacgagttgtttccaatatgggtttcatcggtgtatactcggctgtgtacgactaccagccacagggagcgggcgaactcgagattcacgagggcgacctcctctacattttggaaaagaatgcggatgatgcctggtggagggctaaaaagaaggctagtcgggaggatgaggacgaacctgaaggcctagttcccaacaactatgtcgaagaggtgagtctccgccgatggcacccgcgcaggcctcgctgcatggacaattgctgatattatatgaaacaggtgcaaccagcgcacagagctacagccctcttcgactatacgcgacagaccgacgaggagatttccttctcagaagatgctgagctgatggtgtatgacacctcggatccagactggacgttggttggagccaactcggagtatgggtttgcgccgtcgaattacatcgaaatcatcgaggatacctccgctgaaactactccccctcctcaaccttctgttcgagccgagcctgccgcgccgacgcttccgcagcggccgacgcagactgcatcggaagaaaccgaggcatcccccgccgcctctccggttgatatgtctcacaaccccgctgctgctgcgatcgccagcatcatccataagcagcatgcccctgcgagggtatctgccgagacgaccagagatgaacccccgccacccagtcttcccgtccgaccatcgtacgatcaagaagaggaccacgaggagtctccgccgcctagtctgccacgtcgaccaccttcggaacatgcgtcccccactatgaaccgttactcgcctgacccaactccgccacgtccccagcaggcggcgcctgccatgggtcgtgatcggacacatgtcaaagcatcacccccttacaaccgggcaggtgagatgacgcctcggtccccttccggctatcatatctacaatatcaatgagatggttgaagtgatgggcaagagaaagaagatgccgacgacattgggaatcaacatggctactggaatcatctttatctctcctgaaggcgatgatcggcagaaagaatggagtgcagagaagctcactcattactcgatcgaaggcaagcatgtctttgttgaccttgtcagacctagcaaaagtatcgatttccatgcaggtgccaaagacactgcccacgagattgcagcggcactcggcgagatcgccggtgcctaccgggcagaaggactgcgtgaggtgatcgaggcaggagaagggggcggtcccaagaagggccagatcctgtatgactttatggcgcaaggtgatgatgaagttacagtagctgtgggggacgaggtcatcatccttgatgatactaagtctgaagagtggtggatggtgcggcgattgaagaacaacaaggagggtgttgtccctagtagctatgttgaagtcataggattgataccgaaggcgcctttgatgcctcatgaaccaggtttgtcgagtgtggaaaagaaccggatggaggagatgcggctgtccaaacttgcgatcggcaagtcacggacggactccatggattcatcggaccgtcacagcaagcgcgacagcaaaatcaagtcgaagcccgatatgactaaggtgcgaaggtggacggatcggaccaaggatttcacagtggaagcccagttcataggcctccaggatggtaaaatccagcttcacaaggtgaacggtatcaagattgccgtccctgtctcaaagatgtcagttgaagatctcgagcatgtggagaaagttgccggcgtctcgctagatgaggacaaacctctttcaagcatccgacctcgcgttaccattggcaatgattccaaagctggggcttctgtgcaacgttccgattacgattggtttgacttcttccttaaggctggcgttgggccacatcgctgtgagcgatacgcacagtcatttaacaaggacgcgatggacgaatctgtgctgccggacattacatctgaaatccttcagactctgggtctaaaccagggtgataccttgcgagtaatgaaggttttggatgccaaatatggccgtgccccggacaagaccaagcttcgaaatgtcagtttcggtggtgaggaagtcattggcaatggcgaggacggagggcaaggtggtctgttttccgggcccggtggtgtgctgcgcaacaacactcgcagggccagaccaacaccaaacgttccagccggagaggtcgatcccaaggcgttcgggcagggagaggaacctaaatcatcagacagctcggcaagcccaccacctgcagcagctgaaaagcctgcagccggatttgaagatgatgcttgggaggtgaagcagccgaagcaacctgctgggccacctgcagccaccccgacgccaccgcctgcggcagctcaggttcctcagccaacaggggcaatggcggatctgactttgcttcaagctcctttgcagccgacgccggctcagcctactgcaccagctgccccgcctatacccaccctgcagccgcaggccactgccgtgcaatcaccagctatacaggctcaacaaacaggtgccactcctagcttgtttgcgcaagtggcacagataggacagtatcaacgatctttcagccctcaacagaccgggttccaagcacaggccagacaacgcccacaggcccctccgacagttgggcataattcacttctgcctccgcccccgcaacgcccactgtccgcgcctcagaacttctcgcaactgcaaaactcctttggccctcctccattgcaagctcaactgacgggccttccccaggcgggtcctccggttgctcctcctggccagagtctgaccgaaataaaccagctacgttaccaagccgcgatgcagccgcaagcgacaggatttatgggtcaacctcaatatcagaatggcttgatgccgcagcccaccgggtttactccccagtcacaattcggtatccagcaacagcaacagcaactgccgtttggtagccagatggcccctcaacaaactggattccagggacttgggccacagcccacaggctttggtggatatgggcaattccaacaaccaatgcagactggtatcaactctgtccttccccctgcactgcaaccgcaacccactggtgtcaatggctacggcaaccagtcctacacatctccgcctcctgtgccgccaattccccagcaaccaacagcgacccccctgtcaccacagaagaccggaccggctccccccatcagatttggtgtcaagccagatggtcccaagaagcttgagccacaaccgactggactcagagccaacctttcgcaagctagtaagtttttcttaccattaaaggtggtaaacttgaacagaaactaactcaatttacagcccccaataatccgttcggcttctaaactgcttctgtgcttgcccatactagactggcgtatataattctggtttcctggcaatttcccctatattgcctcaagttttgctcatactgaggctaggatgttcttttcacatatcgcagtgtcctttcgaaccagtgcccttggaatcaacacgtgtacatatcatgaccctggtccccgttttgacgcagcgcgtatcgaagctcatgccacgaatcctcttcgtccttttcccttgcaaaacccccgcacttagcgagctatccatattcctttcctgtgctctgacaggtctgattaggcctctcatatcctgcatttttctttgtctctagcttattgtcatataaatctgcctatggtgatgcttattgtatggatgccctctctttctcccttttctttgtctggatggttacccttttcgctctcgttctctccctttctaccggctcatacataatccatggagtcgttggcatttgcttagtctacgtactccatgagtaaactttctatgcaccgctacccagatcaaactggtacctgtaatatgaacatatatcatcacgcaaaatacatagtgcagttcctttcatgtctcagcttcagaaacgtatagtgttgacatccaatttagttcggtgcactctaacctgaccaatgccacataaattctgttatgtacagattcatgcagaaataaatcgattcgcccttgggggtatatatatcaacacgtccgaccatacaaaaaagttataagagagcatcataatccccgaaacaatagggagatctgtactagtacacccgcttttcatcgcatcctctaattcgttttccgacatgcactgggtaatcatggctcatctccccagatgccaaagactggaagatcctcagccatatacagcagaccgttatccgggaacatcacgtcagaaagtggagatgggccagacgctgggatcgggccggaaggaatagtcccgccaggagagcagccgaccgggatgcccgaggtagttaacgcagaaatggctgcatcataagacaaagctgcggtggggtctgcgccattgcacagggcttcccaaacatcgttgtcggttgagagttggggttgagggagtggttgggagggtatgtaggaggatggacttccaacgggcattttgtcaggagatttaggggataatgcagttgcagatgcagatgagtgagcagcacttggctcagtgaaaggtggggctcctggggtcggggagttgcgatcctcgtcaccgcctacttggccgaagagctggtcgacctgtttgctgcgcctattcatccattgtcgatttcggcgggaaacgtattcggttacagcagcgcggaggtatttgataatttggaagaaacggcatgcatgtggatcgtgcggaacaaatagccctagaaaccgttcggctttgttcattccttcttccaaggggagaagattatcgtagtcggcgaagaatgcagcgccgagaacgatgacagagttaaaaacggagttgatcaagaagggtagtcgacgtggaagggatgcgtaatggcagagatcatcgaccacgtctagacctcggagtgcggaatagacacatgcatcggcaaacaatgatattcgagagctaccgtttcgagtttcgggggccaaatcgagtttgcccttgacatactgggcaacacgatatattaggaatggccgtgtcaacaggataatcgaccagtaataggacccgaatacatgagctgcggctaagctgttttccatggatttgtgttcgagccgctcagtctgcattttgaggattgctggcagagtgcgaacccaagcccgatgctggttcgatatcatctctgcaacattgatcgagatgacttgcttcatgtatacatcggtcaagatccgttcgaatattcgacaaagcgagatcaccgcagctgaaagctgttggtctacagtcaaatggtgctgtgattcgcctgatataagagcatcttcccgtatgtcatagtcgtaatctgaagttgcgggagggcgtcccagggaggcgctgagaaatagatccatcatacgaagactcttccaaacgcgctcccttgctcggcgctcacgcccacaaaagagcgcatttgcatccttgcggtggattcctaccgcgtatgcagcacgcagagcaattcccagattcatgaatgcaccattgcgcctgcatgcgccgagcatatacatggaaaccaaaacgtatgattgaatggtggatatgcttggggtttcctgaaaggccgagaacgccaactgacggccgctgccaaaatattgctcagctactgtctgatcaatatcggaaacctgagctccaatggcaaggacaagatagaaaatcgagctaacggtatcttcgtcacccgatgggtttgcaacccaattagctagccgtggatgaaattcctccagatcaaataagtcaagcaacgggcttgtagcaagcacaaactgacgagctagtcgttgggcttcgtgattgcttggtggcgcaactagagctccggactgagtgcttgggttgccctgaaaggcctcgagcattgagtgtcgcgagttgtcctcggtaaactcacatcggccaatggaagacgtaacaacacggcgcagactctgtaagaacgacaaactcgccgaatcaccaatatacataaactttccctgcccatcgcgcagaagtcgcgccacctttggcacgggagccgtcccttccttctcatctttttcctggcgttccatattcattccttggttctcgagagagttcaaaaggcggtccattgccgtttccctctgcggagatgctaccatgcgctcactgagcaacattgtcgaatccttggcgtccggcttgagtaggcgggcaggccggtccgagaaatggcattccgactccttgtgcctttgaacacagattgtacatggttgttccccgttgcatttttgctttcgccttttacagctgtcgcaggctcgtcggcatcggaggcgtgctcccggggtagtgctggcccgaggcatccctatcgccgcgctcgcgtttggtgaataggtcgggtcactcgtccaggatttcagtggtaatcatcgaggcgtgagatatatatgaaccgattaagtcgggaacgatctatattgattcaagtcattgttgaggcttaatgaagtgctaagcctgttaagtgcggccgtctgctttccccggactccaccatctgactaagcagattcatcccacctgggcaagatgccccaggtctgtacatacggagtagatgaacttggaatcaaaatctcacatgatgtattggtgcattgatatgacaatacatttacttcaagcttacttctccagaagatcacggccggaacgatactatcttgccccaggtgtcggcagtgccccaaatgccagtccgcaggcattctaactgcacaatctggctgtgatccacaaacaggttgacatcaataccaaactcacgaacgtaccaattaaaggccttgggatctgcagcttcaaacatgatatgctcaggaggaagctccttcatgatcttcgacaccacatcagtccgccaggaggtgacgttttcagtgataccttctgactcaatcatcaaccgcttcacaccagcgttgaggaatctacgacccaagtttactaatttgccggggtcagaggtcccaatcgattcaagtcctgaggcaggtgtgtctccgccggctccgaattgaatccccaattcaggcttcggttccaacttgtatgagtggactttatcaataagtcggagccagtcatcctccgggaatgacagaaaaccggaagacaattcgatgacatcgaatctatgttgactagtcagattttatattccaggctcctgggcctcgagctgaggatgcacgtacccgagatccttgcattttttcagatagcggtcaaacaccgtatttggatcgggatgtgtgaggagatgctcagcccatccaccctaaaaccggtgtcaaatgcgccaatttgctggtctaagacagtcttaccgttgagacgtacacgccgtgctcatgggcaagatcgaccaattcccgcagtggcgtctcgtgaaaaagagtaaaagcacctgggttggtgtttatctcagcgctctcgtttctggcgacagccgaagccctgctgggactcacctccggcaaacttcagaccatctacgtgatcgcccatcctatcagctgttgtcagatgccatttggttacgtaggtggggacatttcgaaatattacgtttcgagaatatccgcgagatatcttttacccatgacctagtttaggttagctccacagaaaacgatgatagggctatatggtacccactgagtagtatgggcctcggatctccgtgactcccttcgttctaggcttggcaggtctagggtttgaccgcacgaagccaaagccattttgcttgtcttgcagaagagtgatgccttgatatattttcggggtgacagaaaagtgtctagatggggtcgacagagcaattgaagtgcgactcattatacgcccggttacaagtggattaacaaacatatttaggcagttactggactagttgagctatccacatgagaaatcatgtatattgggagtgtcgacgtcaaatatacttcatcgaatcaatgccaatgagattacgtagtatattacatcattttcgaaataccattacaatctacaatcatattgtattccttcaacatacggcgcacaacatatgaagttctatacaaccccggctcggataccggagactctgtaacgcgaagtgtttcggcgttcggcaagagcagacccgatcttgtacattttatccatccatgatgccaccgttgtagaaggtctttctcggatgacacaggtaccgaggtatatgccttgaagtaccactttatgaataactttatatacatgaggtcgttgtatatctccttgtgcacatctctatgcacatctctactccgtacaaccctagctatatccaatcaatgtcagggaatccccaaactacagtctctgtatccagccacgctcctcgccaagaacaaaagccagccttgtggactcagctttcacacatcgattcgatatagagagttatacccaaggaatagccaaaaaaaatatgcaattgattccggtgactcccgccctggccctggcacctgccttggacattcgccgattttcgaacacaactagatggccctgaagccaactctcctcctctattacctacataattcaaatcccctcattcttaaagtacttctttataggctgctagggacccttcttcttcttctttcaagtcgagagaacgactggtcccttggtctgatacccatcatgggagctggaatggtcatcgagcctttggtggttattgttctcttatttggaggcacctggattaaccgctctgtcggatcatcctcgactaaaagctacaaccgacggaactcgaacgaccttggacgagccgcttcatttgattctttggagtcgggttactcaagccaatcgacaaaggatggtctgctgagccctcgctcccactcaccacaagccccggaagacggatggcacaagcgacaagttggacttttagggttgaatttcgaggtatcctcgccgaatacgattgtattccaagacagtttgctcagtcgattgcttcggaagtttcctttcttggtggaatgttggtattgggctttggtttactgggtaggttgatttgctccttaacttaccatcggtcttggctaaaccaaactcacaatttgtatagacgtaccagctcggtcgtgcctttaccgccgtgactctcaaggatgacaccgttgatgtcgcgaggaggcatgcattgcaactaatcgtgatcgaggagaatctgggaatattctgggagaccttgatacagagacgcttccttcgccatcctcttgtcatgccttggatcaattggatgtactcgttcatacacattcctgggacaatcgcgtttctcgtttggctctattactatactaccgtgcggaatcggatcgacgaggctcagcccggaaagcccaagggagctatgagcgggtcgcctgcaggtcctcttctataccaggcgcgtcggcggactttggccgtgtgcaatctcctcgcattcgtggtgttcactctttggccttgcatgccacctcggttactgagtgatacagccgtggatggtgacgagggagatctagcccgcagttatgggttcgtggacacggtgcatggtatcaagggatcgggcagtgtgtggaccgaaaaccgcttctgtaaccaatatggcaagtgttgtctggaatcctctctatgaatccttggctaactgttaccagcggcgatgccttccttgcatttcggctactctttattgatcggcctcacactgatcacaatccctttgccgcagcaccaccggcacacaatcctgcgtactcggctgacccgtgccttaagactggagctcccgtcgtggcgccgcctcgtttgcgtcatactcggcttcctatatccgtttaccatccttgtagctattgttgccactgccaaccattttattctggatgctgtcgcaggagcgcttgtatgtgccttggggtggtattttaatggggtgctgctcaacctgttgccactggaagactacttcctttgccttgtccggatccataagcctgagccgtcacttctcgatgtccacgaggaggagtgtcccacgaccgaaagtgtttgagaacatggcatccgagtacacccatagttgattcgactttggattcagcgtctttgttttagaacttgataccctgtatgaaaccccaccagaccgcctggtctggtttataatctgtctacatgaacctcccttagttattgttacccagttctctctgtgggattgatgtctctcccgtacctaactttcgccaattagtatgtttatgcaagaaatattctttgcttcctagaagagaaatatgactattatctaaatagttcctttgtagacagtagagcataattatcaccgtacatacaaagacaatccgaatattacaaaaacttcatataatatctctctcaaatccaaaatagaaatacccctggaaaaaacatcagaccaggaaaggaggaatcgcatcatcttggtggggtttacttccatagaactttagatgcgtttaaatcaactcatttgattccatttgtccctcgtattcgctcacctcgttcaaatcagcagcccatccaatacttattatagtgtgctggatcacatattacacggttgtcacggtcgacacaatgacatgaggaggtacggagtcgcaagctccctggatgacccttgagttctgatctgctcgtgattacacacctctcgagagcattgaatacacacttgatacggtggcctacctcgatgtgtattgcgactctaccgctttagcgatttgcgattgcttgcaaacaataattgagcatagcaccgaggctgtcatagtgttgtggctataacaaaaggaacacgtcacattcccttacattgcggccaggttggtttgaatcaatgaatttgcagttaatttgaaaagaatctaacctgaagaacagattcatccacgtgcctatgccccgaatatcgcggtgatagctcgaagtatacatgtctcttggcacttgacagtatgtggtattatatgccagtgaatgaatgcgagaccagaagataacgaagacaaaagagcaaattgactctcgtatgtcaccaatcgttgctattgcgccgtgttgtccagatatcggtgattgtgaaggcatacagcaaagacgtccatcgactctttcggctactgtgtgctacaatttatcgatcttccagcgagacatcagaagaggagaccagaaagaataacggtcgttcctttggtttatgtcgaaaacttggaatatcagtctgcccacgatccgtgatatgcaatcccaccaagcgtcattacttccccttgatacctattaggagctgacatcgatactccattggcatcttggatgcatattcccatcgtgaagtgcttgtctattgaaaaccttcagagaggtaactatctagagacatttctacggagtacccctatgcgcgctgtgcaatgctcttccattgaccatccaaataccttgaaacatttgaaatccaaaaagcgaatcaatcaatcaccctcatcttctaatttaccgtctaagccttgttgtgtggtgacttgaaacttgtggcgtcattgcggtcttccgttctcagacgcgtcttgaagttcccgcgcctttcgcgactctctttcttctccacatctctcctaccctccctcccctggaagctcctcccaccacctatcccagtgccaatctacccaatcgccctgtgaattttcactcatctcattccagcttgccattatggctgacgatacccctgtctctgcgccccaaggcgagcagcccgagcgcgccactgagcaacccactgactctgagaacaagtctgaggatgtcaccttgtcggaagacaagcctgccggtaagcatagactgattgatatcaagttatcgttttgcgactccatttttcaacgctgtcccccggtcgggacatcctgtttctgtgcgacgccactaacccgctgtttcttccagagactgaagctgcgcccgacaagaagacggacgctgaagctgagcctgataagcctgcttcctctgatgaggctcctgaggccaaggccgatggcgaagccgccgaggctgcacctgccgatgtggaggccattgcgcccgcggaggccaacggaacccctgcctcagcgaagaaatcctccaagaatcgccggacctccactggtaccacccagaagctgagccgcaagaagtctcagagtcgcatcacccacctggacgctaagccaggccaaacctatcttgcccgccttcgcagttatgcgccctggcccgctatcatctgtgacgagggtattctgccatccagccttctcgaaactcgtcccgttactgccatgcaaaaggatggatcctacaagggcgagtatggtgacaatggcagacgcgcccatgagcgtaccttccccgtcatgttctttgataccaatgaattgtgagtcgaccatccgcgcagcctctacgccagacgcgaacttctactgacttattttttttgtacagcgcctgggttcccaacactaacctgactcctctcgaccctaccgagtgcaaaaatatttccgagaagaataaaaccaaatcactcatcaatgcctacaaggttgcatccgagggccacaaccttcagtatttcaagaagctgctgaacgaccaccaggcagctattgaccaggaagaggctgagttggaagctcaagaagcggagaaagaggctgccaaggccgcaaaggaggccaagaagggcaagcgtaagagcaagggcgctgagaccgatgttgaaatggaggacgcggatgactccaagaaatccaaggctccttccaagaagcgcaagaaggatgctgagaccgatgctgaggcggaaaaggtatgtgttacaatttcattgtgttgtgatctctcatctcacgaaattatagcctgctaagactcccaagtctaacacaaagctgaagttgaccacccccaaggctcctactgaggatactggcaagaagactcccgccagcaagaccaagaaagcacctgccaagaaggccaaggcagctcccgttgccagcgatgaaggagacagtgccgatgctaaggaatctgagaagccgattgacccagaggaactgagaaagaagaaggaaaaagagagtgagagatcccccatcttccccgacgagtctgatcaggccagcttataccttacagttttgttcctccgccacaaactccaaaaggggttcatttcccgcgaccaaccccccaaggaagatgaaatggctagcatggccggctactttgacaaattggaaaagcattcagacttggaggtctcgatcatccgttcgactaagattaacaaggtcctcaagatgattgtcaagctcaactcgattccccgggatgaggagttcaacttccgtcaccgtgccatgggcatcttgtctagctggaagaacatcttggacgcagacacccccggcccggcggacaaggatgagaagtcggccgttaacggagccaaggaggatggtgttgaaacccctaaattggagacagaagaggaaaaggagctcgagtctaagtcgaccaaggacgttgattccccaatgcctgacgcggatgagaaagcccctgagcccgagaaggaagaaaagcccgaggagaaggcagctgaggagcccaccgaggagaagtctgaggaaaagcccgcggaggctgctgcttgagtggtaggatcacgactctgcgatatctattttcttactcctatccatttgcgctctcattcaagttctcttctttgtttctgtttcaatctacgcggttccgccggttttgttttctttttcatcttttttgtcacctgccaatgcaatactgggatacggggctggaccaaccagcaaggcttctttgaatcaattgaaaatgtgattattgttttttttttaatcggcttctgcacattgacctgtgttctggccatggagtacaggagttacccggcctggatcttcccagaggttgcacgccaatgatcgcttcgatgtcgggctggttatgcaccaaatcgggcccagagtatcggagcgaatgctgttttatgtgcaaatgcacagaaagttccccaagggtacgtaatggagagactatgtcttattcactgcatgtattgagctcttgaatacaaggatccataatggcgttcagtaaatcagtaaatagtagaatgtatgttggtaagcctctttcgaaggtcaaagggcgtgtgcaattgggattattatgtctatagaatctctatttgaatggagtcaaggtatcgacgtatatgcccggctctctgcaaaatcaaaaatccccgcgccttctatatatgtatgcagttatacatcacgctgcttgaaaacaaatagaaaaacaaaatgccggttcgatggaatctccagatttcctgtcgaaatcactcatgcatcgacagcgatgacaaccacgacgcagatatcatcaactttcccgccgcggtaatagtcaccggggtagtagcgctgagcctccttagcaaagggcccatcacgacgatagtcgatactagcaatcttcgcctcgccagcaatcgtcgccgcgagaacagactgcaaggtgactccatcctcaggtccggactcggtgtgagccgggttcttggaaagcggcgagcctggcggagtcggaagagcaccagccaatccacccggcgcagcgagtgcacgcagattctccgagactccgacgccagactccgtagccgtccacgcgcccgtcagaaccatacggctcgtgacgagcttgagaatgtcctgattattgatattatcaaaaacaccatcggtagcaataatgagtacatccccattctgcatctgcacattcgtaacggacgcatcactagggaaatcctccaaaaacgccccgccaaagacagacgcctgggcgcgcatacgcggcgggatcacactaagctggtacggggtgttgaaaccatgcgtctgcggaatcgagtaatgatgcaccgcggccctcctcaacaacaccgagccagaatcacccaaattggccaactcgacccgtccatccggcaaggcgacgccaatagaggccgtactcccacctgcccggatcgtcgaatccgccaccacctggtcgtacccggcctgcaggaggtatttagagcgcaagcgctcggcgggctcgtgccaggtctgtgcggtgtgcgccatgtagttgcacaagccgtgggagaagtcggctgggtcgacgcgagattccgtccagccacctacgccatctgcgacgccgaaggcgactgcttcggcgtttgtttcttggtagtctgagatgcgatttccgatacggcttacgaagaaagcgtcttcgccggagtctgggcggttgcgacggcgactgacggagtttttgtcacttgaaacgcctatggcgtctgcggcagggtcgaaattgtatgcatttttgatggggtggaagcggcggcctttgccggaggaggagacggcgacgcggtaggaaagtttcgagggagagggtttctctaggtgggttgctagcgttgtgtggaaggctcgacgcgagggttgatgggttagattcaggctgaggtgagcatctggtctgactcctgcggcgtgagacgagaagcggacatgttgggttttgaacagcgaggaattgtatgcgttcggattggtggagattgaatatacgccatcgcggacgatggcttggaggctgctgcaggcggaactgcaggctcgacacgagacacttggcggaatcatcgccgatcgggggcttatatacagttccctcgtgaaggatagggctccaatttgggagcgagcgtataagacagaatccaaaaaactaaaaaaatcaaggagctgcatgaatctcaatggataagacagtacccgcccttatcgtctgaccgcctcgcgtcattagtttttcgttgatacctgattactcaggcagaaattgtctttgtttgggatcggacttgggattggaagaaacaagagaatctgttcaatgttattctcatatttagttgaatttaaatatttctacttccacgcgacgttcgtcaaattgcatgctcttcaacgctataccgccaaccaaagtttatcaatgattctgccgcccgcaacatcttgtctcccgccaaccttttcctctaccccaattcttttcttttactcaagcgcgagtctttattaatctgctttttgagccaccggagaagcataggcttctaagtcgcccaagatgatgcacccatcgcgacaagcttatgttgaggagacagaggatacagacatggggggcatcagctatgccgatcttcgtgagtagttctcgaaagcttcgatttgaagcttcctaataaaataatagccatggaccaagattacgatatgccctctacaccagggggtatcccaactgagcgcgcctccgccatcctatcgcaattcgaacggaaacgcagagcagcagcgatggtggtcccaacagatgacacacgagtgcgtgcgcgactacgggaactcggggagcccattaccttatttggcgagggaccatcagaacgacgcgatcgtctacgtgaatttttgaccgatatggcagagaaacaaggcggaggcgagatagaaatggaagaggccgaggaggaaggagaacaacaagaagaatttttcacagatggcgggcaagatttactcgaggcgcggaagaatattgcgctctattctttgccgcgcgcaaaggctcgagtggctcggctcaaggacgaatcaacaatcacacttcgaacacatgtcaagcatcgcaaagctgtcaaggaaaagctacaaggattcgatctttacgggtcgcagattgctggcgatcgtcctgttagcatttgtcgattcgcgccggatgggcagaccatcgctgctggaaactggagcggtgagatcaaattgctcagcgtgcccaatctggaagaaaaagcgaccttcaaggcgcatacggatcgagtgggcggcttgtcgtggcttcccggtgccactctacccggatcgaatgtctcaccttcaactgtcaatttgatctccggaggcggcgaaggaaatctccacctctgggctcttgatcaagaaaagccactggctacgttatctggccattcggcccgtgtatgccgtaccgagttccacccttcgggccgatacgcagcatcggcatccttcgacagttcatggcggctgtgggatatagaaacagcaactgagctgctcctgcaagaaggccattcgcgcgaggtatatacagtggctttcaacagtgatggctcccttgtggctagtggtggattcgacagcattgggcgtatctgggatctgcggacagggcgcaacgtgatgatcctcgacggtcacattcgggagatctacggtatggactggggagttgatggttaccgggtgctgtctggttccggtgacggcttggtcaaatgctgggacttgcgacagatgaaggagacgggcggtattggtgcgcataagagcgtggtgtcagatctccgctggtacaagggtgcagaggctgcgtcattcttgccttctaccgatggcgggatggacattgatggcgctgcaccggctgcagcggaagccccgtcgcccaagaaatccggcacattctttgtgagcagtggatttgataaaagtgtcaacatttttagtgcggatgactggtccctagtaaagtcgctgagcggccactcgggcaatgttcttagcacggatatcagtgacgatgcaaagtggattgctagcagcggccacgatcgaacggtgaagctttgggggattgaatgattcggggttatagcttgactattcccctgtctgatgcatcataattggaaatcgtacacaactcaaggaacaggctgtatgttacctattgaagaagacctatcattatctacatcgctttcctgtgtaattcgtagtcacgtgccaaatgcggggatgacgtaaagcggtatgccgagagctttttatcaactttgaagttatagcacttccgttgaccttcccttgactgtaaaaacactatatagtcatggctttccgtccacagaggattgcacggcatttctgtcgcacaaaaaccccacggcctttatcacgaccaacctcgttatcaaacacaagtcaagatgcatgcctcttctgccgatatcgccagccagcgcgaggactaacaaccctcccaacacgtggacctctcatagcccggacatccaagatacagcaccgctctgcctcaacagagactcccaccccagcagaaccaagcaaaaacacccttgccggcgcgccagacataaccaaccactacacgatcttccctcaaacgctaccagcaggcccgccaccagcctcggcgttcgcaattccaaccagcgaactccgccgcgaattcctccaactacaaggcctcgttcacccggacaagtaccccaacggagcggagaagcagcttgccgagggcctctcggcacggatcaatgaagcataccggacactcctggacccgctgcagcgggcacagtacattctacgggaatggcacgggatcgacgtgacggcggaagatgcgtcgactaagcatgcgcttgatgcggagacgctgatggaggttatggaggtgcaggagactattgaggaggtcggagggtctgctgatgcggaggcgcagatcaatacacttaagaaggagaatgaggcgagggttcttgagtgtgtggggagacttggggaggcgtttgagaaaggggatttggaggctgcgaggaaggagtgtattcgattgcggttttggtatagtgttggggaagggttgagggagtgggaaccggggaacacggagattcggttgatgcatactagttgatcggtggtttattttgtaaattattggatttgttttgatatatttggatagactacgctactctttttacatgtgacgtttttgacgtttggagaattgaatgtacaacaggcgttgttcgttgtatactcccaagggtgccaactatatttgtggattcacgatgggatggtgaaatacgcttgttcctggaatagagggggcgagggatatatttaacctgtaacagcggagccagaggtttcaaaatgtctatttttatagacatctgtaaatattttgtgaatctcgtcgttttttccaacctcggcataagattaggtagcgtttcagggcaccgttgtacaaccgttgaccgctacatccaacatgtccagaatctcgaggacaaagaaaaattcaaaccaagtgaagcttcaaattcaaaacgatggagcttgcaggagcaaatcaaccagtgaggcccgagattgggttctccgaaggctggggattgggcacaaacctgctgatgccaatgtcgcccaacaattggacaatgcatgatccagttaacatcggctgttctgtatggctgctctgtgtggctgctctgcgttgttttttgtgtcggtgatagcggcatcgcattcaaatggttcaaacggacgggtgggtggtggccattggcatccggggggggggaccaaatcatagtatatcgagagaacagtgtagggcgaacacataccacggcaacatcaaacctcttttggccccatctgcatatcgcatatcgcgagttagtcatttggtctagcgttaactagcacaatgggtcttggaaagggttcatgcccccatcacagctgcacacgtagcaggccactctcctcgcccgagatcgcttccagcgccttgggaattggagcgtaaaatatttaatggggctatcccgcatgttagaacgtagttttcttcatctcatcccttctgaagcggaaggtcaactgtcatggagtctgttcctaacttcaataggtatggagagcgcatctcagctatgatataggtatagactgttagcagaccgctaattcaacatcttcagaatcatccattcagcgtcattcaccttcctcgtcggcccacaacatacaaagctgacgatccagtcggggctcgcccaccatgtctctaaaccactggatcatctcatgaacggcccgacgagggaatcgaaacaccgaatcgccgttctggaagaagacgatgttgaaaccttcgttgctttctgcgagtatgcatacactggcaattatagcgtgcctcgtcctgaggtccaggaagatcacagacttggagtagtcgagagctcgacaattaccaactggagagggaattatcggtctgattcaatgtcgtcgattgtgccacccccggctccatcgccacctccgcaatttcgccatcggagacaagaatcgtaccagcagtctgagccttcgcccgcctatgtaaaggaaccggttactccgacatttgcgcgagagcccgaggccgagtcggctccagatcccaagactccagttagtatagcggagccggagctagagacataccacgaagcggagactgcacccgagccaccggctgaagaagtgcctcctgccgacgatgagtgggcggttccgaccgaagaacctgtgtcatgggaatcagaggagcctaaggcaggcaaaaagaagggaaagaaagggaagaagggtaaaaaacaagcggagatcgtcgaagaagaacctcccgcaccgactgagcctgtcagccttacgccgccatcaacaccgccgccagaagttgctgctgagccagaggcagagccagaaacagagcccgctgaagaatggtctccagtaaaccctgtcccagaagcagaatcagaaccggctgagtactgggcacagccagctgaagagcctgcacctgagcctgcacctgaacctgagcctgaacctgcaaccgaagagcccgcgcctgtagaacagcccacacccgctgcggaaggaccgatggaagattcatggactcaagacagaagcccaggcaccagcgttaccaaagcacagccgcaaagaccaatgctcgacatgtcttttgcccaacagaaagcatcctcatccagcgagcctggtctcaacctatgggacgagttcatctctctgcagtacaacgacgagcccacagcctccaagcccaccccggtcgagtcgccaagcactgagctcccctacattaccttccacgcgaaattatacgtcttcgccacacggtacctaatccccgctctcgcccagctttgtctccgaaagctgcatcacgacttagtcctcctctcaccgacggaattcgaaaccccccacctagacgacacggagattctagacggcttggcagcaaccaaggcgcagatggtgctagagctggtgcaatacgcatacacgaagacggcccgactagagccgatctcaccgacatccgccacacagcttcgggagaatgagctgcgtcgactggtagtgcactatttggcgtgcaacgtgaaagaattgtcacggtatcattcggcagaggattcggtctcggcgacgcctaatttgcggccggtagatgccaagacggagcgggctgagacctccacttctacgtcccctaaaagtcttcgtgctttgttagatttgacgacagagctggcctccgatctggtctatcgcatgatgtgagtggatgccgagatgtgattgggtctgggatatgcccagacttttggtgttctattttctgcgttaacttgatatgattttatgcattgatgccctcgagatgtttcgaaggaccgcgctggcgttctgttgcacaatttgaatgtgtcattttctgttttcgaggtgcattgcattatcttgcatttgtcctgcatgacgttaatctttttcttcttttctttctttccctttgaatgaatttgcaatttagattgtgtccatggctgtggtatagtcgtagccttccgggtgatcggtggggtcccgtcgacttggtaggagagagtggactctatgaactccataaccgccagaccctgattgtatcaagtgaattcctgatgacatcgacatgggtttcatcgtataggtcactctcaaacaaggtggcatcttggcaaaacggccaaagataagccaaccaactcaccaatgacgatccaaacatccccccttgaaagaagatcgaccgatcgacaaagatccatgtccgaatagtctcttggcaggaatcccagcgtcaatagtgctgtttgatgggggctgtgaaggctgtgagggtcgagaagttcaggggaaaggaagcgccaagagattccgaggtacgtcaacctgccaactccacctgactttgtgtcaaattctcatctcaacttctctccttgattttcagattgcgtgtcttctattgaatttgttctacacgtgcatactcggtacacgcaatggtgtgacctattatttcctctcctccaatcctgtctctgtcttcataatcaaagcttggcagcggtccgtcaatgtactggagatcgctcttggcatttggcgtttaggcacgttggaggcgcattggaatatccctgtttaggcttttctatacatctgatgccctatcgggagggctcggcgtcaaaggcaatcaaagtcggcccgtaactcggctttgagattcatcatctgagtaacctgtctctgattcaaagtgagtgttgaactgacacaaatgcacagattgtcaatcagcctactctgtactctcccaacgactgggtctccattcagggaaaatcactacgcaatggtttctacatgttcttggcagagctggactttccacccccctaggcatcgaagttctatatgcctaatgctcagatccgcagtggatctctgtgctttcggaactgcccctagaggcacaaaccccctgacgcatatggagtatgaatcgtccgagcccaaaatcctggccgatctattcttatagatttctccatgaattatgggtccgaaatgctcgttgaggccgctggtaggtccattgcaaatgattcctttgccttgcctaccttgtatataatcccctttcggtttttgatctttttcactatcaaaatgtagagtcttggaattccttggctgatctttagtgattccgaaaaaatatgaaatcgatatgcttggatgttctgcccatggtatattaacatcaccctttcgcaccttctccatcacttccattcatcactcatttacttcaattcttccagacttgacttgaatttgcttttttattcattctatgatcaattggtctatagtcctatcttgaatacattccacctatactccttttttatgttcaaaccttagggctgcatctatacctcattgcatacaaacacacacacacacacaatgtccaacccagttctactaggggtctaccctaaccacagccaagagcttcagcctccatctgcaccgccgtctgcaccgccgtctgctcactccgaaacacccttcatggaatcagagaagtaccagaagcagtacccactgagcttccgcgatcgtctccgccatttcacatgggcatggtacaccctcaccatgagcgcaggaggcctcgcccttcttatagcgaaccagccgaacaagttcacaggctaccacgagatcggcctagccatctatctgatcaacctcgtcctcttctccctcgtctgctctctcatggcagcgcgattcataatccacggcggcgccctcaactccctccgccacgaacgcgagggcctcttcttcccaaccttctggctctccgccgcaacactgatcaccggcctggagaagtacttcggcgagaaccccgccccatccttcacagccacactcgaagtcctcttctggatatactgcttctgcacattcactctcgccgttgtacaatactccttcgtcttcacctcgcacacctaccgcctgcaaacaatgatgccctcgtggatcctccccgcgttcccaattatgctaagcgggacgatcgcgtctgtaatcgccaaaagccagcccgcgcgcgcagcaatcccaatcgtcactgccggaatgaccttccaaggtctaggcttctgcatctccttcatgatgtactcgcactacatcggccggctgatggagagcggacttccatgtcgggaacacagaccggcgatgttcatctgcgttggaccaccagcgttcaccgcgcttgctctcgtgggtatggcgcagggactgcctgcgacgttcaacgtgatgggcagtgaggacactactgccgacgggcggatgctggagattctggcgttggcggcaggcgcgttcttgtgggcgctgagcttttggttcttctgtgtcgctgctattgcggttattcgggcgccgccgacgagcttccatctcagctggtgggcgatggttttcccgaatactgggtttacgattgcgaccattacgcttggaaatgcgtttgacagctccgcgattaagggcgttggctctgcgatgactatctgcatcgtctgcatgttcctcttcgtctttgtcaaccatggtcttgcagtctatcgccaggatattatgtatcctggtaaagatgaggatacctcggattgagatgtccttccgacaggtattattgtctctcgtgctgtttttgatttctttcttgtcacttttggtattttctcggctttttgcacagtccttgttcgcgttggtcttctttcattgcacacactactgtcatctcattgcggtctttttcattttgattcccaattcttgttgattctccctcttactctttcgattcaaaaaagcgttcaagcattttgttttctttgtcttggttctatgagaactctgcatctccggcgtctcatgtcctgtctgatcttccatctccttagcgactactacatttcaatagaattagaacaagaacatttcatttcattgcaatcatttcatacctgcctagtaataataaaacaaaacaaaaaaaaagaccaatccgttgtgtacaagtacgcagtctaagaatcagaacaaagaaaacaagtcacgcgaccgtaagagccctacttggaagccttcattgcaaaacaaacacaacactgcagagcggaaaaaacaaatcgcaaagcgcaatcaggaaacaaaacattgaagaggctcgtcttggcttcaccccggagggttactggaccccagcaccacgttgaggtgcgagccgtcgctggggtaaatggcagaataaatggcaagatacatggcaagataaatggcagaggacatgggaaagcaaacatgatgacaaagtccctctcttcacttcccagccggcaccaggttgccccaggaccggtgggcagaaggcgggggataaatggtgaacaagaaaaccgaaagatgcaagatgaataaatggcagaagaagttgcaacggagtccctctcttcacttcccagccggcaccaggtttccccaggaccggtgagcagaagacgggggataaatggttaataaatggcaaggctcgtcttggcttcaccccgaagggttactggaccccagcaccacgttgaggtgcgagccgtcgctggggtaaatggcaggataaatggcaagataaatggcagagaacgttgtaagcagacatgatgacgaagtccctctcttcacttcccagtcggcaccaggtttccccaggaccggtgagcagaaggcgggggataaatgataaacaagaaacccgaaatgtgaaatgtgaaatgtgaaatgtaaacaaagcgaaggggctcaccgttgcttcacccccagcacccggtggtgcgcgagccgtcgatggaggaaggtgggagaggatgtgtaaacaaaggacggtgacaggaaaagggggaagaggaagaaaacaaacaagtgatgatgatggatggatgggtggaaatgggagatggaggacgatgaagatgaatatgaagaatgggaaatgagagatgagaaaaaaaggagggatggggagatgaagaagagaagagggagatgggggagacagtggtatttatgggagaaacagtcgatggcctcaggatacacctggtcgccctggcaataactatgtatgtcaccattatgtcaatatgtatagaagtagaagagaagacaatgatattgaatcctatgtaagagattgtcaccttgctcagcaagtttttttgtgtgggtatcatgatgacaggaaaaagcagtcttgtgccgcacatggcttcatcgctgtgaagcgacaggtcgagttcatgctcgacagtcaggccttgagacgtctaagcttcgtggagcacactggcgcgcactggaaaaacggccagaaacacgtgacgccgacggcatctgatggactaccacgcggccccatctgctgggaaggagtgaactgctgaggcgagacttccggattggtgaaggccctcagagtggtagacttgggatgaagtgcgaaagccgttcacagcagcttaagcaatctttctgccgacgttaccgatgccacggccgacgatgctgacaatcacatctccatctccattgtcaggtgcgtctcggataccccagccgggggcaccaaacttggacagatctcgagcgagctggaccacgttgggatcagcaatcacatctcggccaacctgcagccgcccgacatcctccgatcccatggtcatgagagtgaacatggtggtcgcagccgcaggagccacacaaccacccttggcaaccgtctccagaagctggaatgcacactgctttccaacttcctcgggggcttgaccacccgacggtggagaggccacatcagccgagaagaggcagcccgtggaagactctgccaccaaagacaaaccaaacccaaggccaatctttttctttgcctgggggttggtcttatccggagctggtactaaaggcgcagacgccacgtcggagaaaatataagtatcagggctgagtgggttgaggataccacgggcagtctcaatcatgcgagcgttgttcgagccagacacaccaaccgagtataccacaccgcggatgcgcttgatgcggcctgcgttcatcaagtgcagagtcttcggcagacggacctggtggccaaacacaagttgcacttcaccaccgccacccctgccagtggggccagtgtttgatcgcctcaggatacggagctcgatgttgttgaagataccaaattgtttgtacagagggaggatcgctgtgcgaacactgtcgacggacatatctccagtctgtgtcgacgatgtgatcacaccaggtcctgtgaagagcaccttcatgggtgctttggcgaatggggccagcagacatagagggatcaggaagtaactgagaccacggttacagtttgaaggaagctcgtaggtgatcatgccgccgctggctccagtaccggccgtgctgccggtgattagacccggcttatagacaagcacagtacctgtgtatgagatctccatttgagagccattggttattgcatctagaaggcggaggaaagaaatttcatgaggcgcaagaccagggttcgtgggcgacgaagaacgaatttgggagatgtgaactgtgcggccggtgagggtggacaaaaccaggcgatataccaaattatgatgggatgtgaaccgaagggggggttgagaggtggccattttgtgtggttggtcaagtctctcgccgttaatcactgcaggccgactgttggattcgagattggaaaaagaaaaattggcggagggaagttgatccgggccgattgtttaagtccggggtggagctgatatctccggggatcagatcatcgttttcgctttctgacggttccgacctcatgcgacatttgcgaaaagctaccaaagtagaacactgacaagatcatattttgatatattcacgatgcttccaccagcactaaacattcccaaatggcaagtccaagacttaacatatctttcttacaatgcttccgaggttcccccactatatgataccatgattcatcacgcgacccataagcaagctatctaaacaaaagccaactgctaatgaaatctatccaggctcgaagagaactcccatctcctccaaccaccggtcaacaactattgcgtctaccacccctccgccacagccggctacacggtgatgatagtgggcgggcccaacgcccgaaccgactttcacatcaacacaaccccagagttcttctaccaataccggggatcaatgctcctcaaaacagtcgacaactcaaccacacctgctactttccaagatattcccatccacgaaggctcgatcttcctactgcccgcaaacaccccgcactgccccgtgcgattcaaggacactgtcggtgtcgtgatggagttgccgcgggctaaggatgcagtggatgctatgagatggtattgcaggaagtgcaaggagattgtctgggagaagaagttcgtttgtgttgaccttggaacgcaggttaaggccgtagttgaggagtttggggccgacgaggaaaagcgcaagtgtaaggcttgtggggagattgcggcgtcgaagtatcaggatggggaaattgtgcaacccccgactcatcctgagtagtatactgatcaggtccatgaggtgaggttgtaattctatcagttatgagtggttatgagtggccaattcaatattcctcgatgataaggatagaatagagatagagtagaatgagacggatacgttcctcggcatatcaatgggcgatccgagtcgaggatatacaacggaacatgggaagcagatatacaccaacgaacatcttattatgaccaaaggcatagtatttattacaagtacaaagccctcaccgtgttcccattcctctgctttcctccagctcccgaaaaagcaaacaccatttattaaccgggtaaccgacccaacaatcatgtactagaaaaaacaccccatagatgcatgcaacagagctgtgacagagagctgtgatcttatgggatacactgaatccatgtctctaatatccagaacattattcatcaaacgggcaatcgatgctttcatgcccatcttgctcacagagagcacaccacttggactcatcgacgactccggatgacttaccagcaacggcagccatggatgaactcagcccgccgataccttttagtccttccatgaccacatcccgtcctgtctttagtgcggggggagtattggtacggatggacgaggctttggtctggaggggttccgtcttctcaattgggtgttcctcggcaagttcatcggcagcctcatgtttgggattcttctcttcggtgttgttctggccagagccgaacatgctagtgcagttcaggatgtcgtggccacctgtttcgcagatctcgcaccacatggtatcctcgtcggaagaacgctcggattcatgcatggtctccagtcgcgattgagaagagtttgacatactacggtgatgatggaggtccgaaggagcatcctgccagtcggtcgggaccactgtacggtcagagagacgattgctgttgggatcatctaaaggattggggacattgcccgcagagtgcgatggcctgtgttgctttggcgaaagagtgacagtagaactgcggcgacgaccaccagactgcaggtgcatttcttgaagttcacgctcgagctcttggatgcgattgtttttgcgatttgtagtttcttccacctcctgcagtcgaatctccagctgagtaacgtgctctggatcatggtcatgatctgccgagttgttctgtccttcgccgctgggatttcctcgactcagagaatgaataatggccttgagccctcggatctcatcatccttctggtccaactcactactgcttcggggtccgtctgcggcggcatgtgcatctttcaatgcagcggcggagtgatcacgctcctttttcagctccagcttggtgcgttcaacttcaccgcggaggaactcgacttcggccctagcctcggcctctccacgccgggcgtcctcgaggccttcctctaactccgagactagctcttccagctgcttgagctgctgcgcaacaacctcaacatcttcgccgcggtcctgcagttccttgttctgctgtataagctcgtcgagacgctgctcgtagacgcgttctgtttcagaggctgcaatctccaatgtgtcgagggtgcttctgaagtctgcgcggtgaacgtcgaattcggccgttaattggataatccgctcgttacgttcacgtaattgtgtgcggaatgaatgaccttccgatccctccatctcctccaaggtcttctggaactcgcccaaagttccggactgctcgtcgagctgcttatctcggtctagcagctgcttctctagactcttgatctgatccttcaagtcttgaatctccgacgagggcggtcgacggaagtccgacggccgtccatacgacgaagcatcatcatccacactaagtcgcgacgatggtctatcagacagccgagatggagccttgacgggactacgcatgccaccgttcagccccgctctcgatgcagtcgacggtgtacgcaagccggccaggcttagtttcggaggaggcggcacgcgcggagattcgggtcgagggagagagggtcgtcggactcgagggcggggagtagcaagagctgcaccgacagatttgctgaagttgaccggccccccacgtgcaggagtaatcggtgtagagatatttgaggatcgccttgtgacatacttgttgttgttcatgggcacgaatataccagaacccggaatcgaggttgtgaagtacttccggccctcaacatcgccgctgtttttgcctctttgcgcatgctcggcgctcagttcgacacctgcgaatcgtccggccttccccgctaccgatcccaagtatttgatcgtcccatgcatgccaccggggacattcaccacgtcaccgacctgtacatcatcgtgcgccattggggagaaatatggggtgatatgaatatgaggagaatagggtgggatgcggcttttaaataatagccccgggcgaatatcgatagcccctggaagggtttggaagtcagggtgcagagggagtgtttaggagaatgcaaggatatttgacggcccaacttccaccatgacgattgggaaggggaaaaaaggaaataagtggaaaacgacaggcccgattagtcccgatttaattagttagaataagagaaatgaaggtgatcgagaaatccaacgaacgcaacgacaagagaaagggggaagacaacaaataaacgggactccactccacgtaatgccaactgacatcctcaacttccaccatctcctcctcggcatatacaaaccttgcctctgagtctctgcatctccaagacatctttccgacgatcttgtccgttccgtacgaactcctgcgcaactaccacctaccgtgccggacgtcaccggggcccgacatctccacctcctgccctcgcatcatacaccatggcgcaatatttcttcgaccttctatacaacttcacggattgcatgtgttgctttcccagctctccacagctaaagatcaacaaccgaagtttcaagctcctacgtttgttgggcgaggtatggatacccgataacgatagctgcaagctggtctgaactgacaacgcaacagggtggattttcctacgtctacctagtccaagataaagcgagctctgaattattcgcgctgaagaagatccgctgtcccttcggtcaagagtccgtatcgcaagcgctgaaagaagtcgaagcctacaacctcttcaactcccaatccaacatcatccactcgatcgaccactgcgtgtccacagaatccggctcgaaattcagatccgatggcggagatccaggctcgaaaacggtctatatcttactcccatactaccagcgcggtaatctccagaacgctattaatgccaatctggtcaaccataccaagttccccgagaagcggctgatggtcctgatactcggtgttgccgatgcgctgcgctcgatgcatcagtatcgggtgaagaacggcgcggcgtctacgcgaaaggtgaaggctgttcggagagaaggcgaggaggcagacgacgaacggaccatgcagatgaaacccaaacggagggctagccatcgcgttcctgagaatgaggatgaggagaatgagcctctaatggatgatgaggtcacccggagtcaggaaggtgtcgaggatggggacctgcgcccctatgcgcacagagatgtcaagcctggtgagtggccgcacatgcggaaattccgaatcgactcgacgagctaactgtattacaggaaacatcatgatcgacgacaacggccaatctcccatcctgatggatctaggctctttggcacccagccccatcgccattacgtcgcgctcactcgccttggcagtgcaggataccgcagcagaacacagcacgatgccatatcgtgcaccggaactcttcgatgtgaagacagggtcgattattgatactaaggttgatatctggtcgctgggctgcacactctacgcctgtcttgtgggcaagagtcccttcgaggcgcgcagcgaagagaccggtggcagtctgagcatgtgcgttcttggtggtgactggcggttccccgatgagaagtctggcgcttctaagggtaaagctaagtccggcgaaagtgaggatgcgtctaagaatgaggtccctgcgatcagcgcacccgtcaaggatattgttcgcaggtgtctcactgttgaaccctcggaacggcccgacattgacgagcttatcgagctcatgaagagtgtcattgatcagatgcctgaagatgatgcgggcccatctcactgagatctacttggatcttgcttgttttctgttttatctgcgttcttctttttgaccggcaggctccgtgtgggcggtttctttgactgtacattatgaatgcgaattgatttttgtgatatcagggctgttcactgtctactttttgctgttcgaattaccagtgtgtctataagttgcaacccataattctactcgatgtttatcgccatattttttgcttcagtcgtgactctaccatactccgagatggcttcatgatgacgacatgccgagtttgtccacgattcacaccaagcagagatctctcaacccaatccaaaccaaacagaatcgagcacaatgagcagtaccttcgatgaccatacacaggggacggacgtgttgaatctgttcccagaccgggtgaagcacaaaacatgtaccgccacagccccaacccacgcggtataaaaactaatctccaccgcatagttttaatatccggcctcagacgaggtgatctcgccgcaatgaccgcagacgtcctcgcgcacggcggcgcagggaccatcatatacacaggccgctcaaagcacgaactccagcctgtgatcgaccatatcaatcggaaatacaaaacagtcaaaatggtctttgtaactgcagactccggcagcctgacttcgttccgcgaggcagcgcacactatcaagaagctgggcgtgtcgattgatggcttcgttgggttccccgaggtcatggctgtaccgtggtcgctcacggaggacggattcgagtcgcatttccaaaggaattacctgtgttatttcctgctgctgaatctgctgcgtgatgttatggggcccaggtcgagggctgttctggttacgtctagtttgcggaatgaggcgcctgcgcctacgtgggatgatttggggttcgaggtgagtgtgattcttttgtttggattatatgtatacttgctggtgtagaagatgctgatttggatagaatggagaaaattaccattgtctcgatgggtattcgcagtcgatgctcgcgatcatcttgtttatcaagtcttttgcaaagaagcatagtggatctatcgctgccttttctgcaaatccaggaagtgagttattaatgtcgtgaatgtgtttttgattctcattctcattcgatctagataccaaaaccaatgtccaaacatatgttggatgggaggaggtcaaatcctggctgcagcggaagaaagaaggtacgtccagataactaacagatagcgaagaccatttcatttgacaggatttcctttatccagccggcgaagacctaccggttcttttgcaacaagcgccgaagtccctttgtcagggtagtggcgctgtcttgcgcgggttgctcgatccggagcttgaaggtaagataaccatccgacgacaatgtgtctgtactgattggtgggtatgagtatcagcccaatctggagcctttctcgatcattgccagaccccaaaactaccccatctcgacttcccagcaggcgaagagagtgcagaggcgttatggaaacgaagtcaaaaattagttgaaccgtttctttcctgaaaggggagagagacttaggccgaaataggaaggtaatctatgctatcaaagtatcaaaggagtataggattccgagattactctgatatcggactcgacgatgttctttgtattcggatatctgcagtgaaagtgatggctaaagagactatatgccagtctatgccagtctataaatccatacaagcccatagaatccctagaaatccaagatataaaaacagaaaatataagaatccttgccaagaccttctttgcggggaaaagttcttatcttttctcctcgcctcctcttcatcttctaggaatctcaacatgtcgatcttcgatcatatctgtgttatctttatcccttcgattcggctgccttgatttaaactggctctcctccggtaaataatatctcatacttgagcgggcttttttttctcttgaatttaccccattcatatatataggaaggaattgtacttcaccatggcgccagtcatcgacagcacagtcatccctggcaccgtgactctggtagacgtggatcatgtcgtggagacccggcacttggaccacggagaccgtgacattgtattgatcccgaccccgtcaaatgacccagatgatcccctcaattggagtccgagacggaagattctgtcgactgcttgcgtgagcatgtaagtgcaggctatgacctgagccgaggatcaatgttgactttctagctatacgatgttctcaggaattgcctgctcggtcgtttactcggtaattacgccgctgcacgaacaaacaggattacccattagtactctgaacgagggaagcgggtatatgtttttgttggctggctggggtctgctgttctggcagcctttcgctatgcaatatggcaagcggccgacatacatgttgtcgttgatcggaattttggtatgtcattcttaattattttggatatcacttgaacagtatagctaacaaccctagggtatgacgatgtgggggtaagagcaccataatgcccgtgatgagacaagactaacaccaatcagaccatacgcaagcaccaagggccaatggctcgcaagaaacatcgtcttgggtttcttcacagcacccgtagaagcgcttcctcagatctccgtcacggacgtggtaagtaaaaccccatgaggaaatgactcacgcttacacaatatcagtacttcacccacgagcgaggaacatacatgggtctttatgcattcttcctagcaggaagtaactacctagcaccggtcatctgcggctttatcgctcagtaccagggctggcggtgggtattctactacccaagtatcttcgtcggcggtgcccttatcttcctcttctttttctgcgaggaaacaaactatgttcgagcacagcccgacgagcctagcactatcgcggaaaccccaaaactcagctcggaagaccacgaaaaagagaaatctgtggatgttgacatggaagctgccactagggctagtataagttcgggctacaccaagaagtcatatgtgaagaaattggcgctctggggaccgagtcaggagcaaaatacttttttccggcgactctggcagtgtctttactacctgtcctggccggtaatcttctatgccgggtatggatacaacgtttttgattttatatacgttttgactaacatgcacacagcttctcttacggatcctatctggtttacttcaacatcatgaatggaacagcctctatcattcttggtggagagccatataacttcgggttggtcttattattacccgaacaatgaacggagcaagctaacaaatcccagatcttccatggtcggtctgagctatctagcacccatcaccggtgtggtcctggggtaagatcttcgccttggtccgatacttcaacgcaagctgacagtaatagatcttttttcactggccgatttagcgactggcttactgtggaactcgcccgccggaacaatggcgtcatggaggcagagcaccgtctctggcccttcctagcttgtgtggtgcttgtgcctgcttcccttattctatggggggttggtgctgcccatgaggtccattggtttggactaattgctggaatgtgcatgctggccttcacgaatacatgtggcatcacgctcagcgttaattactttattgacagctaccgagagttgagcggcattgccatggctagtgtgattctgattcggaataccatgggctttgcaattggttatgggtaagttttactcttccaattctagcagacaaacactaacttcgtttagtatcacgccttggattgagaacatgggttaccagaactgtttcatctccgctgctttcattggcatggcatgcgcctcagtcttcctcttcatgattaaattcggaaagaccttccgtgaacgttcccgcgagaagtactggaagctggttcaagagaactgggagaagggcatgggcaattagaatagatgcaccgttataatacacgtatacagctcaatagaccaacatttattacacaggagtctgttcctcagcaagatgaatagccccttcatcatcataaacaatctccctcaccttaaccgacctcaaatgatcgatcccctcagaaagctcacagtcatgataaaacaagtaccatttcccctggaactcaacaatcgaatgatgcgtcgtccatccaagcacgggatccagaatgcgtccctgatacgtaaaaggcccccaaggcgagtctcccgtggcataagctaagaaatgtgtatcaccagtcgagtaggagaagtaatacgtcccttgataccgatgcacccaagcggcctcaaagaatctcctctcatgatcatctgccagcaagggctccccggtctccggcgcaaggataacaacctccttcatcgacgacacaagcgaaagcatatcatccctcaacagcgcaacacgcggacaaagcgccctaacaccctcgccagtaggttcctgaggtccagacctactctcatcgaaaacaagtctcttcttccgtccagcaccctccccatcaacacattccccctcccccccatcctcatccttcccctcaacccaacattgcaactgtcctccccaaatcccgccaacatagagatacgcctcgccgcccgcttcttcatcaacgaagacagcaggatcaatgctgtatgtaccctggatataattatcctgcgggatgaacggtccttccggggattgagagacagctacgccaatacggaatattcctttgtggtctcgggccggaaagaataggtagaacttgttattcttcgttgcggcatccggggcccagagttgctttgagacccaaggaatgtctttgtctcggaggacaacgccgtgatcggttacggggctggtgattgtgtccatggagaggacgtggtagtcggccatgtcgtattggtcgccattgtcgttgaaggtgattgttgttttgcggtcgtggctggggtagatgtagagtttgttgttgaagacgtgggcggaggggtcggctgtgtagatgtgggagacgagaggtttgggcatggtagtggtggtggtgatggtgaggttatatagggctaaatgtatagatggaagagctgggtatttaggggattgaaggctattaatatttcattctctactatcctaccatgttactatgctaaattatcccctcattatcccactatcatccccttattagcctatagcttgtctctatactctatacctcttttaaccgacggctaaataaccacggcgcaaagtccgtctcagaaaggaaacccatgcatagcccggattcttcatgttctacattctgtctatattccatttcatcagaaatcaaactcacttcaagttccaccgatgcccctcctcagcatacgctctttgcaacgcctgctgccactcccactccatctggcgtagcacctcatcttcacctccattcatatcttccccattatcactaccactcccatgttcatcatgatcctccatttccgcatcctcctcacaccccatcaacccaaaaaatcgccctaacctccgcaccctcgtagggagatcaatggtcttctcctccgccgtgccaatccacggggtaatatgaacaggataattatatgtggcagggacaggcgggtagacctgatggaaatgacgggcgaggttatcgacctgctccgaggtcagaaggttgtaggctagcatgtttggtgggaagtccgggtgttggaggcctgtttcgcagttgacgaggggccagaggtgggaggagaggtggcgaaggaggggtaggaaatgagggtggaagttagggctttcgcgaaaggtgatgttgggatattcaattgggaagggggattcggtgaggtctagaggtgttatgcttgcggaggacatgctcattgggcttagggtatctgctatggttgtggttgatgtgcagattgagagggttcggtcggagagccagctgatgctgtgaggggagttgggggttgtcgggtcgttttccattttggtgttggtagttgtaacggtggtagtggcagtgttgaaagacaagataaaatacactatgcaaagtatgaagaatgtaaattaaggaaaataaggacacttatatagatgaaatgtatgcgattgtcgaaaacttcaaagaaccaacgacaatgagatgagacgtctcgaaacagcctcttctttataacacaaagacatcgtgagctctccaatcaagccgagtttcacgcacaacccccttctccgctttgtttccaagaaaagaacaataaccatgttcataaatatctgtcatatacgtttcatattcaagttgagtctcccattggcccaaacggccaaatcaaagagaccgttgtcatcacagcgacaaattacccactgcgcgtgacagatcgggctcctctgacacagctggcagacccacgtacttgttaatccagttcaaaacggtccggtgccacatgagcgagttttcagggttcagaacccaatgattctcatcagggaatgtcaggaacgcactatcaatgccgcgcatctggagcacattaaacgcagccaagccctcggcgatagtcagacggtaatccaactcgttgtgaatgatcagatgaggcgtgtcccagttttccgtgagccgcgacggatcccacttcgcccagttctcgggcaccttccagattggccctttcaggtcgtgtagagggaagtattgttcttcactagccatctgtgacgtcatgctaaacactccgtcgtgagtgactaacgccttgaacttgcgaccgagcaggtttccctgcatccagttcatcatgtagccgccatacgaggcacccagtgcaaccgcgcgtgtgacgtcgacgtactctaggtgttgctcgatatagtcgaatcctttgactaggtcctcgtagggccgaccgccccattgtccctggattccgtcggtgaagggctggccgtagcctgtactgcctgttggattgggggttatcacaacataaccttgttcagcgaaaacagcggggttccaacgcgtgctccactgatcgttccacgcgccctggggtccaccgtggatcaaatacgcaagcgggtatttgttcccgggtttgaagtccgacggcttcacaacccacgcatggacagggtggtcttcggctcccttgaaccatatttcatcgacctgagacggagacaagccgaatgctctgccgccccgcccgtttgaggataccagttgaacatcatctgggcgggccgggtcgatgatggtccacaggctgttatctaccaggctgctgctagacacgaacaacttgggtgatttagcagctgctggaacggcatcgttcacgtatcccgatctggtcagtctctttaaagagtcgggcttgattgtgtgcgcattctccaatggcagctggtaaagaactccgcgaccggcctcctcgacatgaataagcagtgacttgtcatcatgagcgaacgatatagctgatggactgagatcccagagtccttcgccgtcgtccgactggaaaatttcgatcatatctccattccacgggttgggaacatacaagatacggttcttatcagactcatagccatcctcgcgcatcgtcagaacggcaatagagctaccgtccgagctaaggacaggagacgacatcgctccctgaagaccagcaaccttgcagattttcggtccggggtcactcatactagtccacgagaacatgggagaataatagcatgagcaagaggtatgagtcgcggggtttaagttaggatctttcgcaataaagacaatagccgacggactaatatcaaagtctgcagtaccaccaaaaggcggaatcggcgactcgacgcctgtcagccccgagaccgcgatcaagtttgtgaggcccgagatggaatatttcccagagcatctacgggccggtgacagaggagcctgttctagcaagccatagaagattgcgttcttctggggctcgacatacgagtcccagtgcctaacaaagagagacgtgtacagttttccggttgtatggggcttcttcgcatcgtggggattgtatagcgatccgtctgtattggccttgcctgtcacggcgaagccgacttttcctggctccagaacgaccaccttcaagtccgataccgggcctgggacagtgcctgcggtgtatgtttcattggcctggcgggcatcgccgacaacaaagcttgtattgccgttgcctttggtctttagccagacaagtttgtcgctgtcgtccacccactgtgggttactggcgccggggtcgttggtgataagggcagagcggccagagctaatatcgataacgcggatttcatttgtcttggcatgagactcgaaggagtaggatgtctgcgtgtagactgctagtgtgccggctgcattgggggtggcagaggaccgcctgggtgctccgagcaggaccctggagtaatcagtgtcagcccaatgcccccaaagacgttcaatggatattgatgtcaaactgtcaagtatctcaagactacttactcgggagtgaacttcatgttccgaatggtcatatcagatcgtatgggagataagataggaagctcgggggagcttccaggatcggattgagcttaaatcgaggtatcaacagggtctaagtatagatgaaaaacgaaaaacacaagttatgtatgctattgatgataccaagacaaacagggtatgagaagaggagagttggagaagagaagatgaggctggggagcaacgtgatcatgcgggggttacggtctggatcgggttaagcgccatgtaccttgcaggcatggcatatactgtgttacatcgaggaagaccaaagtaatatggaaccgattttgtactcttagacttcggaaatttaactattattacaaattgtaaaccagatcatgacatttactcttcctcttcctcgctttcatcttcgtccattccctccgccgcattgacactgaacgtaggagcctgatccacaccaacatagctgtcgctcataagatagagcgtcaactcatggtttccaggtgtagggactacatattccaggcgcagctcgagcttgcgaccgatggtgactcgtttgatagccagcaggctcttggtcttttcatcgccgacaaccaaccaccagttctccatcttctggttggggtagaatggtgcatggacagtagcgtcgggctcctcgtcttcttcgatgtcccgctcgattttgaccttgaggtatgcgggttcgcccgaagtgataccctcggcatcctcaacttcgaagtcaagctcgatgttgggatacttctcattggtgaaagccgcagcttgcgccaattgtttgttgtcaaggccgaggcgcttgaccaaagtagcgtaatccttgttctctgatggatccatggcctccatgaattcgaagatatcattgattctgtacaaagggtcagcaaatgtgtctagagatatttcgaacgatacatacttgtactcattagccaccttgatcacctcattagagaagtggggaatctgcttcagagggctgtcacgatcccacatggcctgaaccaccatctgggacagttccatcgcgttcatcgcgttgagatgaccctcggatgagaggacatccacacaagcgctgagcaggttgaggaccttgcgaacgatgtcttcctggtccttggcaagatcaagagggagctgcatgcgcgagaagtgggcctggaggaggacgaaagccttgaaatgaggagagtcgaaggaaacctctgacatcttgaccggtacacgatcatacacgcgacggagaatgtgattctcatggcgacgcatctggatagactcaaactcggtcgccgatgtcacaatctccaggatacccttgagcttcgttcgagacgagagagacaacaagaatgtttgcattgtgatgaaagagatgttgtagtaagcacagatcatagcagcgttcaaaggcgaaacgctgtcatcttcttcatcaacatcgatgatctttgcctctgacaactccttcaatgtattctccaccagttccgagaggaatgtgctgagtccctcgtggctcacatcgctaaggccgtagaaactggggtttgcaaggagacggcgatagaaataggtgtatgtcatccaatcaaccgcatcctgggtggaggagatggtccttgtgctgacttcagtcacaaaggcatcgtggaggtaaacctgcaggtgactctcgacaggcaaggcctcattcaagaacttcttgtagtagtcgcgcttcactgctggcaccataagaacaccacggccaagcttgtcctgaccgggacgggaggctttgccgaacatctgtaggatatcgctgatggggtagtcgatgtagcgatgttcacgaccatcgaagaattgggtgttcataatgatgaccaagtgagccgtgatatccagttcccagcacacatctctcgaagctaacagcacctgaatcgcaccaatgttaaacaggtgtaagacaatgcgcttgtcagtggcattgagagcttcatggtagtagccaataccgtgagaaagcgatgtggcaagagtttgctcatggacacgttcaagcaaaggcgtaagctcactggcatcggcgttcaggaaacgatcttcatcgttgtcgatagcacacgccgagagaagatccgcagcggtcgcacggacctgcttgcggcttggcacgaagaccagagcaggcttatcgggagagagttgcaaaatcgattggtaggccgggcgagccattgcaagcatggcggatgggaagtgagggatggtgaaagattgaaggtggagctcaagaggaacaggacgggcatgagggctgaagttgtagatggtgtgcttgttggcaccgatccactctccgatatcccgagcattagagagaggcacgctaagaccaacaatgcgcatttcattttcagtctggagagcgatgtagtgcatgcgagacacgatcacttcgtacacgtatccagcatagccaccgagcaagtgtagctcgtcggggatgaacagttgcactgtctggatgttcttacggcgctgccactggcgcgacaacacatcccactgagtaggagtggcgagcacgagatcagcctgttcaagaagtttcaaatcggctgtggtttcgcccgtgagcttgacaatggttttacctccatccagtccaccaagacgcttctgccagtcagctagccggtgatcaacaagctcctggaaaggcgcaatgtaaactgcgcggccgctatcctgtcttgaccagtgacgaagcaaggccaactcagcgcaaacagtctttccacttcctgtgggagcaccgatgaagatattgtcattggtgtcgaatactgacttgaagacctgagactgaatcttgttgaaatgctgccagttggggtacagtgcttcgtagtcctcacgcttcagtgctttgacgggtgcgcgctgcatgtcgagtagaggcgtatggggagggaaacgctcgggaagaaccagcttctggaaggacacggcaatcttcgtctcagaatgcatccatcggtcagacacaagcgatatgaagtagttaggaggcatcgggtcagtgacaggaacagtgaattcgacgagatgctcattcatctcggacttggcaaattcagcacgaagcaagaatcgatcatggaacaagatctcctctccgtcacagtcctctaccaaaatccagaaatcttgagcgttgccatgtatttcgtcatcccagacaaaattgggggtaatggtcaactctacccgcagcatggatcgcgtgatgggctgcacttgagcttgaacatcgagtcgagggaacttggataccaagtcgcacacaacacgtccagccttgggcatgctcagaagctcacccatacggggaggatccaaatcgaaataactgctccaaggcacatcaatgcgctccgccttctgcaagacgtcccttgggcagtgagggaattgacgaaggggggacatagttggccacatgcgcttctcggccattttgcacagatcgagcgcggtcttggccactgaggcccagcctttcttcaggcaaatctcgaaaatcgcgcggatgatacgtccagcagattgagtgacatagaccatgtctgccatcagggccagcccctcaagcttgagcctagagatataagcctgcaaaagaacattgattttggcatgaggttcatcaatcgtctccttgacagggatgggcacccggccgagcagttttcctaactcaagcttctcatcctgacggaccggaatgtatttaaactcatcactcaaggcaaagattcggaataattcaatgtttgtaatagagggctggaggtgttgggagtaggtcagcattgagttgtgaccaatatagtagtgcgaagagatacgtccaagctcagtcgactgcagacgcccagtcttcttatcatacttcacgagaccggccttctcaagtaccacagcagcggagtgaataagatcaactcgcttttgctctagtgcatcatcgttctgataatcggcgccaacactgtacaggccaggtgatcggagcatccgaacgtaaaggtatgtgtagcctagccaatccacaccttcatcgcgggtacggacattgccaagtacaatctcagcattgagattgtccgccagtttgctcatcagctgcgactcaattggaagctgttggttcaagagcgagaggtagtattgaagttcagcttgcgatgtgatgatgataccctcaccgaaggtatcatattgtggtcgaccagctcgtcccaacatctgcagaacgtcttgcgggctcaactcgacccaggcacccttctcgggggagtagacctgagttcccttgatgatgacggtgtgggcgggaaggttgacaccccaggctagtgttgcggtacaaacgaggacttggatgcttccatcggcgaaaagagcttggacggaatcacgatcggcaagactcagaccagcatggtgaataccgagaccgtacggcatgagatccttcaggttagcatcgtccacagagtctgcttcttcggagagaatggcacgactagcagcgtcactgcgcagaatctgaccaatggtttcattctcaagagccttgtctctgatgtacttggcggtcttggcagtctcctttcgagagtggacgaagatgagcatttggtttcgttgttgcccgacctgctccataaccttggtataacagatgtcgttcatcgtcttcaactgtttgatggccttcttttcggtgacaccgatgaattcctgcttgagggggcaaggacggtagctgccgtcgaaatggaacgtgcccttgacaggatctgcgcgcaggaaacttcccacatcacggtagttgggaagcgtagcactgagacccacaattcgtacaggctctccagtctgctcggttttgcgaatcgttcggctaacgatgctctcgaggacggggccacgttcatcgtggagaagatgaatctcgtcgatgacaataaggcggacaaggttggtgtagctagtttcagttgcctttctggtgatgacgtcgtacttctcgggggtggtgacaatgatctgggtatcggcgatttgctgcttggtgagctgacgatcacctgtgagctcggacactcggataccataaggttccaagcgcttgccaaggttgccgacttgttcctgaaccaaagccttcaagggagagatgtatacaattttgaagtcatccagcatgatctctcctgtttcagggttgcgattcttcccgatttctcgaaggatcgcgagcatagcaacgttggtctttccggaacccgtgggagcacaaacaagcaggtttccatcgtcaaggaaagctgagggatagcaccttgtctgcacacggttgagttcttttgaggttccaaatccaacacgggcccattccggcagctcagtggtcgggatattcttctctccagcctccttcttagccttaggtggtggcacatggatctcttcgtaccccttgaatcctcgcttggttgagccctggggaagcttgacattggcattggtcataagatgattgccttgatggaagaccaaattttccaaattgattgttctcttgggctggagaatgccagcctcgccaccttcggctgttttgtaatcggtagttggacccgaaggaacatcgacatccatcaagtcgaacttcatcttcttacctggtggtgctccaagttcgtcaccggtttctttgccacggatttcatcgaggatggcacgttgaccggcttcgaccatctcaatctccacgagattgcgcgcagaaggatcctctgcgactcttctccagcgagtaacccagacggccttgtcacgattggtaactagtttggcgacaagatcgggatggtcatagtcgaagagttccatgaggtcgttctcaacatcgcgcaggggtttcaatgttccatcctcgtccttcccaccgaggatttcaagtgcttcatctgttttctcatgttgaatgtgagcatctgtgtatatcgcaccgatttgacgttgcagccagtaagcgtcaatttcgcgagcggagacgttcaatccggtcttttctgtggctttatcacttcggccgagacctccatcgatgaccatttcatctccgtcttcgtcttgggctgctgcagcatcgtcgattgcgagtcgttcctgttcatcctcctcttcttcgtcactgagctcgtcctcgtctcgaacctcgtctacggttcccatgcgctcatcgtcttcatcttcatcgaaaacgacggcaacaccttggcgttcatcaagttcgccaccctcttcctcgagaccgccttccacctcttcctcttcgtcttgggcatcgtaatctgtaatttttttgccgaggttcaccagctcgttgaactccttggggttcattgaggtacccagaagatcatcaatctccttctttttatcaaaatccttcatatcttcgtccttcagtagttccaaaactgcatcggcagcacttcgaacgacttcatgcggaacatcgcccagctggcttccagtgattgtgagaataaggtcatacgtggctcgtgtggcgggtgtgcggggacgatatttcaatccttcgacgaaggcatcggcggctgaaaggatgccctggcctcgaagttgtgctggttggccgcggtggcgctttttctgttcgcgtagaagcacatcttcaccctcgccgattgcaccccgctcaagacctgtcggggctgcctttttagatttgggcgcgtcttcacgcgcgactcgtccacccatctcccgaatcccaatgcgacccgctagagactccgggtctccagtgggttcgtcatgggtgcgagtgataaaacgacgatccgcctggagaaccaggttggacatcgccgagtacttatactgtgagatatcttggtccgccatcttgttggttgtatggctgaatcaagggaaaaaggatgaaagaaagagtgagttgcgacaagaacctgcctgcggagggtcaagattcaggccgcgccaagacacgagatgtcggcgattgatcaattttaaatggtctcacaaacctggctcatcctcctgccgcaagtaatatcacttgtaagggagaaatatcagccaaggttgtagctagtagatctcaaggagagtgcagctcgggaagatttcggtggcgaaggcggaagaggggagcttgaatggttctgccactcgaaacggttcgggggcgcgtcgcaacaatgcgcgccggtctctctcgtcgtttaatgccagtttatatgaggcctctggcgactttgatacgttcatctgatcgttgtaacattcaccggaccatatgtcaccatgcacgtcgaacctccatacaccaacgcgtgtacaccgccgcatcgaaagtccacaaacaaggcgcaaaaactaaagcgacagtaaagttgaaagaccttcctcaaggagttttgaaactcgaggcatacgatgatcaggtggatgaggctcctcgttacccgactgtggtgcaggggcaccgaaacaatatgcaaacgttcaagaattgtgttatcttgacccgggtcgggggcttctatgaggtacgataataggcaccacatggctagagagctccatgctgagagtgtgttctgtagctctattttgaacaagcagaggagctggcaccattgctcaatctcaagctcgcgaccaaaaagaccaacggcgggccggttccgatggctggctttccctttttccagcttgatcgtttcctcaaaaccctcgtcggagatctcaacaagtatgtggctattagcgaagagttttccattaatgcagaagacaaggcacgcacgagcggcctcctctttgatcggaaagttgctaggatcatcacacctggcacgctgattgacgagaaattcattgaccctaccgagcataattttttattggccatatacttggatgtgccgtctttgaaaatccaattgaagcagcacgctgacaaggatctccaatcatcgtatcagcatatcctagcctctgtgccccaacaagtaggattgtcatggcttgacctctcaactggtgatttctttactcagctcacaacgagtcaaatgcttccgtctgcgattgcacggattggagctcgtgagattttggtagatcagaatgtgcaagatcttattggacatgaattgcaattgctcgttggacacgatcatcgccttgtcaccttcttccaataccctggagaattcaaaccggtatctgaatgggggacaatgttagagtctcccgttcctgaagaaactcacgcctccttcacaccagaggaagtagcagctgggtacagcctgcttgagtacattcgcgtgcagttgcaaggatcgaatctcaagcttcagcctccaattcgaagacatttgaatgaatcaatgggcattgatcgtaacagtctgagtggtctcgagattttagaaacagccagagacggttttgggaaaggaagtctccttcacgctgtgcgaaggacttctacaaaaagtggtgcacggcttctacgagaccggctaagtatgcccaactaagagtcaaaagcttttgtatagctttgctaatgcattacatacagcctccccatctacatccttacgagtcatcaatgagcgtttggaccttgtctcggtcttcatagaaaatgtcgagctccgtgacagcgtcatccaacttttgaaacgcagccatgattctcaacgcctagttcagaaattcgcatttgggaaaggggacccggatgacttgatttgtctttcccgcgccattgaggcttctaaggaagtcagacaagttcttctagatcacaatagactttcggtctcatccaatacttcagatctgaatcacagtcttactatcatgatttcacggctttttctcgatggtcccattgcgctggcggatcaaattcttgcagccattgacgaagaaggcttgttacaaaaacaacgcatcgaggatagtactgccgcagaggcagccaatctggcacaaaaggtcactatggatgaagccacctccagcgagctcgaagcgctgccgaaaaaggtcagagcaaagaagggcgagcgaacagttatggctgatacggactccggtcctatcgatacctggattatgagacgtgacgctagtaagactttgaatacactccacggggacttggaacgattgggcgatgaaaagacttcattgactcaacgtctccgtgattcagttgattcgtcagccctgagccttaaatggaccccagggttgggccacatttgccacgttaaagggccaaagatatcccagaaatccctagaagacttgggggtcactcgaaatgtctcatcgaccaaatctacccggtcattctatttaccagcatggacagagctaggagtaaaaatggaccacgtcaaggtccggatccgtcaagaggagcaaacgatctttgaacgtctgcgccgcgaggtgatcctgaaccttgtcaaaatccgccgaaacgcagcagtcatggatgagctggacgtggcgtgttcatttgcaactctcgcccaggaacaacaaatggtacggccgattctcaatgacggtacctgtcacaatattgtcggtggacgacatcccacggtcaaactggggttggaggaacaagggcgatcgttcgtgagcaatgattgcttcttgggtgattctgagcggatctggctcattactggccccaatatggcaggtaaaagtaccttcttgcgacaaaacgccctaatcacaatcctcgcccaaatcggatcttttgtacccgcagcttatgccgagatcggtatcgtggatcagatcttcagccgaattggtgcagcggatgacctcttccgtgaccagtcgacgttcatggtggagatgttggaaactgctactattcttaaacaagccacgcccaagtcatttgtgattatggatgaggtgggccgaggcacaacgcccgaagacggtacagctgttagctttgcatgcctacatcatttacactatcataaccagtctcgggtgctttttgctactcatttccatgcccttgcggatatgacggaggactttgccaaattggcgagatactgcacggatgtgaaaactacggcttcgggtgccttctctttcgtccaccgactgcggaaaggcgtcaatcgccagtctcatgctctgaaggttgcccaactggctggtttgcctaaagagaccctcgagcttgctatgcgggtccgccaggaaatgaaggatgaaattccaccatctcgagttgctgatggggatgaaccctagcatcagcgtgctggaggcgaaatgttgtggctaatgtgtatcacttgaaggtactatgtaagatatttatgtacaattttcggcttctcctgttaaagatcccactaagtcagaaagcaaggttggcaaatgcctcactcgcatctttttttttcaatccaactgtcggagtcttcgctttcaccctaggaacccaaattttgcgattgtttcgtagacgttcattcacacatcaaagcttaggtgaccacaacctcggacccttctcaatccgaccgtgttgaccctcgcgaccaagatcaacaacaagaccctccttaaacgcaacctcctggcaatcctcacccccaaccccattaacaaactgcacaacaacgaaatcaatcctcctatgacccaaaactaccataggggcatgccacgtgccaacaccataagtcacagcctgaccaccacgcgccacaaacgccttaatattattcagatccggcgggtcacgaatggtgaccgtctcgccggcctcattctccgcggtagcagtcctccactttagagtgggggcaaccactatcaaaaacaacggttcttcctcatcatccccgaccttggaatgggcggataaatcgaccgggatgaaagtttgattagtaaacgggtggcgctcaaggatccgcacgtcaaagacctcccggtctggcatctgggggccgccgctgacagtgcgcaaaacgcgcgggaagcagcaaaacatggtcatgcgtgcctcggagggctgcccgcttggacataaattggtgtatcggtcgatgagcggggagatgggactgtatttgagagcggagttttggttcgccagtaccggggttgggttatgtggcggtaggcatgatgattcaggggcgatatttagttctctcggtaatggggagaccactgctgtaccgaacggtgcgaaattctcctctgtcagaggctccggagtgagtgtgactgtcgggttggatgtgaggaccgacaccatagtgagattttaggtgtaggtgtgtgtggatatgtgtgttggtcaatcgcttcgtgttcgccacttgctagcgtgcaggtctacagcttcatgagagagaaaaagaaaggaaattggattggatgtggtttatgaagctaatgtcggcggcgtcctccggtgataagataagcggccgagaccgttttttggatatattttggattcattttcatacaacttggagaatactactcggagaactatataaaaaggctgtttgtaaccattctattttgattcttttgctttttatgttagttcaagtcgcaagctcttcatggtgtattgccacttagctcgagcccgttcaagcgtgataaaatacaccaatttcttttgcaaaattaaacaaagtctctacacataaaaggagctaattcaaaagacatcgtggcattgaagtctgtgcagaggacccttgggattttacgacaattttctcgtacccagataggcatacataggtaatacacagtacatgggagtcaccttatgatatgcatgcatacattagatctatcaatgtcggtgtaagagccctatatgcatttcgatgtacaatcatgtactctgcaaccctggagtacttgaccggttattacaggtagatctaaaagacaacaggatctttcgggatatacgcggaatgacgacgataatagctattggcttactataggtccgttgctccgggactaataggcaatatagaactgcatgaggctcacacagcggtgactcaattctcgttgtcttgctcttggtcaatgctataggaaatacttagatataaagcattcctcctgagagctcggctcattctatcctccttctgatattcaaaggaacctactcgtgcttcgactctacttaggatagagtattctaagcggcaaagaaatatttccagtgcaatatatatcaaacgcaacaatgaattcttccaatcaatcttctccccagcaaccatctacccccaatacaggcagttcaactgctgccgctggaagctcatctacccctccaacaagctctacctatacatatacagagaaaccattgaggtaagacaaatatttgctatctcgcctatactaaagtgctaatacggacccgacaactcaaatagtgacgccgaaaatttccaacgaaacacagaccacatgggtggttggatcaaggacctcgaccacccggatcaattgacattgtctaactgagtaggcaaacaattccactcagctttaactccacgaacatgtcaacaatacggctatttgataggtctgagaatgatacgtgcaagagctggttcgtgcctgaaggattgtcgatgaatccactcatgcattcaaattccgaacacgcccgaaattgacaatcttattcttcttatgacgcctattcggagaaatggcgcactattgcatgtatatttggagtgggagacctctgggactgatacgaacatataacgtggttttctattctctatcctctattttctattttcttttatctttgtctttgtcctttctttggacgacaaacatgtgataggacaaaaattgagggggagagtgactagggtatgcagccactaatcgtcttgcatggtatgccagcgaattggtagatggcaacatttccgagatattcgacgccatgagaacggaggtcaacaccgaataaggaatatgatgttttagccgagcatggacattatgtgttgtctttgatgtgtttcccctctttttttcctatctcgggcaattagcctccgtattcgttattaaaatgttaatattatgcgtggtgctagtggtgctagtgatgcgggtcaccaacttatttgatttggggtggaatcatttaaacgtgcatataaatgtaacatcaagttatatgcttgatgcagtcgtgcccaaagtaagcttgtgggattttagcgtcctaatggagtcagatacagcaaggatggcatagccaagctgctagtttgccgctcactctgctaggactggaaaaagcccctagcacgtatgaagctctatccccgagccactttatgtgtaaagtataatcatttccacactctgccaaactcatacctacatgcagttatagttaaccagtagcagcttgagggaaaagcatgctcggggtaaacaactgagaacttcaccttccgggggcctcgaatccttctacaagagtgatctatgagctaacgacttggtatcgacacctctctctccgatagaacaagaaaatacgtctttggatagaaacccgatgacgggtattgattgatcaaaacgggcagactatggaatgaaaggcctggatgatccttagttagacaatcatatattcgcttctggctttccattcccctgcagggaatcaagtcttcgctttcgcatcccatgtaagtccattcagcgagcaataaattcgatctgctcgccttttaccgtcaccgccgaaaggattcattttattggaacataaacccgagcgatggcaatcgctaatcgtttcccattgcttgatcatagtatagatgatggcagggctggactcccggatatcgacggtgactgatagagccggaccagactcaaataagtgggccgtatcgatcaagcaagatatcttccttctgatcaatttaccgagtgtgaggcctaggtgtgctgcatcgcaactctcagaacactgagctggacctttcagcagtcttgaaatgtgttctttgatcattaattcgaatttttcgatgcctttctgtctacattgatcaattttgtctagaagtgcacgattagtgatttttcacataaatctcatctcaaataaatgcaacgttctattttgttcacatgcctttgatggaatttggaatcgggagattgcttgtgtcaaatggccctgttgcttgctgtatggcaatttttgttgttttctggaagatcacagagtgggaccggaagacacaggagatcatcatccatattttcatgtcttgtgaaaatgaagacggaacaagcgactccagggcttgtatccagattccagcaaacacttcgaccacctcgttgcattgaaaaaaatcagttgccacggcgatatcactcaattgtggtagggtcagcttcaggggaacttgtcgtgaacgtccatggatgaggttcaaaaggaccagaaggatatctggtttgcagtcgttgacgggaatctcaacggatcccttctttgaaagagcactcccttcagcccaacaatctttcagcagtcgcttgaaataagccgatgctagtgctaggtgcttcgatgagacttggaagcgagcgtagtttcccggcacattgcctttgctgatgtcaatcaggggggtttttggtgtgaagagaataatatctccatccggatcaacctgatagggcggatgcaagtcaggtgccactacagcagtcaatatgggtttagtgtcctcctgttcttgagtcgaagccatgggtgtagccgatgttgactttctcaaattcaagccacgcagtgattttgtttggcgcggtgccattacggctgtaggtatgttgagggatattcaacttggccaaccttcaacagagagaagagaatggggagcgagacagagaaaataaacgcgtatttatgttgttgtcggaaatgaagcgtaagcaaaatcaaaagggtcaattgtggatcatttgcatatctacagtgaagtacagagacacgttggacacattctattcctgtacgatataatgaagggtgatcaaaagtacctggttttaggcatacagagatatgttgactttccaaatattctgcaaaaaggctatacaagtgttgcccaaatgcatgggagggggtctttactctttgtatagcaggagacccaagaactagtctctttgtatagcgctccgcctataaatatgtttattgaaggaaagggcagttcagggtcaataatagacctcaggtacaatttttacatgctagcgtgagttgatcatgacagtaattccaaagcctaagctttggatcatcagtagcgcttagcacctgtgtttttgtaagagtcgactagtaaaattcaaaaggatgtgtcttggtggcttggtaagggatactcaaatgataaatccattcatatatgcccattccaactatgctatacgtggaggatgtaaataagttccgagagctaccgtagtaacggcaccattgtgatgatgacaaagcttcacatttgggagtgaagggtaacagtgatgaagacaccgcatcagaaatactctttagacaagagaatatctctgggtaacatattgtttggctctgcagcggcgcgtacatcatcgtggtgtattgagtagcgattgagtcacagcgcttgctccaaaaagtctcaactagaacaccaggggggtgtttcgagcagtttggctcacaacttatgatactcgctaatggtaagccatagtatatcaattcctgccttctggtgacagaggaacggacttccatggcagggaaagtttaaagacgccgtagcaagtttaaatcaagtagcattctctccttttgcgtcaaattttgctttcttggctcgtcgtttgatttctcttttggacaaaggcttgtcagcatcctcgccgacaggctcagaactgatagaagccttcctcttgagattgtccactccattttctggctgcacaggttctttggctttggggttattcttttgctttggcgtgaaaccttcaggtttgactttctccccaccattgacgatatccacgatgcctcgccaactggttcgcttcaacttagccaacgcggtcacttttcgcgactcttcgcagactgcttcctttccacgctcttgtgatagaccccaaacacaggcaagatttatcacgtcccacggggctcgtagacctaaagctcgtcttgcttcgctagacacaatgatgcctcgaccgcgtgtcgcgcggatcaaggatgttgcattcccaatgaggttccttcgggcgtcaagtccactccccgtgatccctggcccatagcagatctcgatgcgaactccacgtgagattgccgcagacagcatcttgaatttgaagtggtatgggagtcgcaccgagagatccacagagatcacgtcgcattccaagttggtgcatgcattcagaagtgacttttcattcgtgggacggagagcaacgatgtcgtacgcttgactcagcgcgtttaggcgctgattctgcgcaggatcggccagagtcaggttcaaccgggtcagcagttggagggatttcggcgcgtttgttggaagcggaggtggagcgaggcttggggggagcttcccgttgattgtttgagatagggctacggtagtgtaaccaactaaacagtcaggtcagtccctcatgtgctccaacctacggatcttgtgccgcagagcggaatgaatgacttacgctcggcaaggaaattcagagtatggggcacctccgggtcatcggggctgtaaggtacattcaggtcgtaaaacatggtgaatttaaaggaaggtcagccctgcccgtggaagttattgctttacttctcagcgctcttggtcacgtcgaactgtcccaaaaaggcaattagaaaatctatcggattaacagaggatccgtcagtgcactaactgctttaggtcgggtccccacaaacctctctgatcccgtgacctcaggcggaaccgatctcgttctactgatcatatcacgacaatatctcacttcgtccatcccattgctcaaggcttcttgtgagcactgtgtttgggctgaatagtcgctgggcctgttgctacctgtctcctacgtctacctaatccccgaccccttcctccgtcgcacggccgagcccctcgtgaccccgccgcacatctttcaattgtggccgcactcggaaaccgcctgtcatcgtcaagatggcgcgtgtctatgccgatgtcaacgagcatatgcctcggtcctactgggattatgatagtgtcaacatctcttggggtgtccttgaaaattatgaaatcgttcgcaagataggtgagagatgatgaaacctgtccttctgcagcatgtcggagatggttgccgctgtgagctgcgggtgaaatttgagaacaagctttctgactttctactttaggtcggggaaagtactccgaggttttcgagggtatcaacgtcgtcaactaccaaaaatgcgttatcaaggtcctcaagcccgtcaagaagaagaagatcaaacgtgagatcaagattttgcagaatctcgcgggtgggcccaatgtcgtggcattgctggacgttgttcgcgataaccagagcaagactcctagtctagtgttcgaagctatcaacaacaccgacttccgcacactgtaccctcgcttttccgattacgatgttcgcttctacgttttcgagctgcttaaggcgttagacttctgccacagcaagggcattatgcatcgggatgtgaagccccacaatgtcatgattgatcatgagaagcgcaaggttagtgggcttatcaaatagttgtggcggaaatcatggatctaacatgttatagcttcgtctgattgattggggtctggctgagttctaccacaagggcacggaatataacgtccgtgttgcgtctcggtatttcaagggccccgagctgctagttgatttccaggaatacgactattctttggatatgtggtccctaggggctatgttcgcatccatgatcttccgtaaggagcctttcttccacggaggcagcaatacggaccagttggtcaagattgccaaggtccttggtactgaagagctgtttgagtacttggacaagtacgacattgaactggacccgcaatacgacgacatcctctcccgtttccctcggaagccatggcactcatttgtcaacgcagagaaccagcgtttcatcagtgacgaggccattgacttccttgacaagcttctgcgctacgatcatgctgtacgttgtgattaacatctctataaatgttctatgctgacttctcaaaggaccgcttgactgctcaagaggcaatggcacacgcatactttgatcctgtgcgtgctgatgcagctgcccttagccacaacaatgtgacactcccctgaattcctctcgcatgaactgttcatgatcatggttctgatccttttactgcgatgcccggcttccaagttctccgcatgctgccatcaagattttgtcgggcatcacaataattacgtacctcttacatttgaaatttgctgatatgaacggcacaacgatgatcgaaaacatgaaatggcttgatcttcgtacttcctgttcctcttctcactggccgttcgatgatggactgcggcaaacgatcaaatcctgaatgaagacgactttgatgacaagacatcatgacatttaatttgctggttccctccaagcctcttatcgcctaggtcgtttggcgtgtcaatgagcgtgataaaccaacgtcttagatggggcaatcgctcttctttttcatcttttcctatttgtatagcgctcgtgggtctccctaattgatttctcccttgttagttaaattggtgttttggcctttgttttgggtgcttcgtgtttcaagggatgctttttcctaagacaacccattgcattttcttaatgtttccctttttatgaatgaaacattagacgagataaaaaagaagtttcaagagaccctagaattgcaatttgtatggattgaacatcgtaggtagggttctatgtatcacgcgtataatatggctcgacccatgtatagaatgacatggtataactatctagactcagaccatgaaacagatatcaagtatgaataacctccaattcagtaaataatcccaatcttcctcttccaatccggttcttatagatgtagcctcagatcacccgttggctccagcgtatcacgtgaggattatcgcaatgtcgtcctggccgaacaaatacaagaaaagacgaattgtaacaaagaacacgcgaagaaaggaacgtaagatacccaataatacccaatgagtgttgactcatataaacacgcttcattgacctgcccgccgactccaccgaacctcccaccaagccccgcgctctcattcgttcattcagcgttggaaatttaattgcccgcatttcgcacaacctcccctccttatacctctccatctctcaagatacttatccggcgattcgtggcgcgatcggcgccttggagatttactcctcaatatcgtgcattctccaggatggctcaaaactctgcctcccaaacccccagtgagtttcatgactcattctcagatgtcgcagaagcttatagtgaatagcgggtgagcctacggctccaacccctcaggtcgacgaacagactcgcgccgagttcgccgatgttgccgcaaaggccccccagaatccgcagggcggaccggccggcgctcccaaggtgaagaccgagaaagagtgtatgttaccaccaagatctatattcggacctttcctcggaagtcgtttttgtataatgagtatttgctgatactgtgggtgattcctagtggaaaaggaacgcaagaaggccgaaaagaacaagaagttcgaagagaggcaggcggccaaggccaaggctgccgccagcaaggccgcagctcctaaagtcgagaagaaggtgaaacccgagaaggacaagaccgccgatgcctacgatcccatttccatcgaagccggtcgtctcgaatggtgggaggagcgtgatctcttcaagcccgaattcggacctgatggcaaggttaagccggaaggctccttcgtcatccccattccccctcccaatgttaccggttctcttcacatgggccatgcccttaccaacgccctccaggacaccatgatccggtggcaaagaatgaagggcaagactaccctgtggcttcccggaatggaccacgccggtatctcgactcagagcgtcgtcgagaagatgttgtggaaaaaggaaaagaagacccgtcacgatattggccgagaggccatggtcaacttgatctgggattggaaagatgaataccacaagaacatcaagaacgccctgcgcagacttggtggttcgttcgactggagccgtgaggccttcaccatggaccccaacctgtcagctgctgtgaccgagaccttcgttcgcctccacgaggagggtattatctaccgtgccaaccgcctggtcaactggtgtgtggctctgaacacctctttgtctaaccttgaggttgagaacaaggaaatcgagggccgcacacttctcgatgtgcctggctacgacaagaaggtcgaattcggtgttctgactcacttctgctacgaggttgatggaactaccgagcgtatcgagattgctactactcgtcctgagaccatggttggtgataccggtattgccgtccaccccgacgacaagcgctaccagcatttgatcggcaaaaacgctcgccatcctttcttggaccgtctgatccctatctttgctgacaccgatgtcgaccccgaattcggtactggtgccgtcaagatcacccccgcccacgactttaacgatttcaaccgtggtaaggcccacaacctggagttcatctctgtcatgaacgacgatggtaccttcaacaagaatgctggtccctttgccggcatgaagcgctttgatgcccgttacaaggtcatcgaagaccttaaggagaagggtctgtacgtcaagtgggagcacaatcccatgaaagtgcctcgttgcgccaagtccaacgatgttattgagcctatcatgaagccgcaatggtggatgaagatggaaagcctggttcagcctgccattgatgccgttgagaatggcgatatcgttatccgccccgagtccgctgagaagagctacttccgctggatgcgaaacctcaacgattggtgtctgtcccgtcagctctggtggggacaccaggctcctgcttacttcgtcaagattgaaggcgaggatggcgatgacagtgacggtaacctctgggtcactggccgtaccgaggaggatgcttgcaaaaaggccgaggagaagttccccggcaagaagttttctctggtccgtgatcccgatgttctcgacacttggttctcttctggcttgtggcccttctctactctgggctggccccgccagactcacgacttcgagaacctataccccacctccgttctggagactggttgggatattctcttcttctgggttgcccgtatgatcatgctgggtattaagatgactggtcaggttcctttccgtgaggtttactgccactctctcatcagagattccgatggccgcaagatgtccaagtctctgggcaacgttatcgatcctctggatgttatggagggtattcagctgcagactcttcacgacaagctgcagttgggcaacattgccgataaggagattgctgctgctaccagataccagaagaaggcattccccaagggtatccccgagtgtggcgccgatgctctccgcttcgcccttgtctcttacaccaccggtggtaggtttcatctcatgtccttgtttgattccatttactaatcatgatttgcaggaggtgatattgctttcgatatccaggtcattcacggctaccgtaagttctgtaacaagatctaccaggctaccaagttcgtcctcggcaagcttggcgatgacttcaagccccaggctggtgttaagaagactggccatgaatccctttccgagcgctggattctgcacaagttcaacatcgccgccaaggagatgaacgaggtccttgagcagcgtgatttctccaactccgctcagatctcctatcagtactggtactcccagctgtgtgatgtgttcatcgagaactctaagtacttgctggcggatgatgcctcggctgaaaccaaggagtctgccaagcagaccctctacacggcccttgagggtggcctgaccttgatacaccccatcatgccgttcgtcaccgagcacctgtggcagcgtctaccccgccgcgaaggtgataagaccatctcgatcatgaaggccaagtatcccgagtacatcgccgaattcgacgatccggccgccgccgatgcctacgagctcattctcaacacctccaaggccatccgctcgatcctgtctcagtacgacgtcaagacccagggtgatattatcatccagacctacaacactaccagcgaaaagaccgtgtctggggagatgaccaccatcaagtctctgggtggtaagaccctcggcgagctgtctcaccttggcccggagaacaagaaccctccctctggctgcgtggtggctgctgtcggctctgatgccgctgtctacctccgtgtctccaaggaggttgcgctagagcaggaagagaaggctaaggctagcctggccaaggcccgtgagactgttcgcaggtctcagggtattatcaacggcgctggctggaaggagaaggtcaaggccgaggtccgtgagcaggaggagaagcgtctgcgtgatgctgagggcgaggctgcccgtctcgaggagcaggttaaggagtttgagaagttgcgtctggagtaaattgtccatcattgggtagagttaaacaaaatacatcaatttattcccctctttcaaccgtgcattcactgttaagtcgtatcccagttaatcagtaattacccatgtaaggttccaacagtaacctgcactccggctcgcccagaaccggtgcagccgatgcgatgtgcatctgatttatatatgatatacgagtcattaatcactttcattcgacagcatccgatgttgtcattactattcctattgcgaattcgggatgttttctgcagtccgtagagatgcgctatacgaagagattatcaaacttcgattttctattacaataatattagcatctttgcaatatctcatttcattgcagtccatttatgtagtatatctgtttcattggtactttttccaatacatccatgtggagatatatattattggatggtatagcaagattatacagcgtggacaatatcaaatatacgcgattgatcttaggagaggaaggttatagttctgcatactaaaaacaaaagaacttcctatattcgatataagattcaataaaaagacttacctctgctaaacatttaaatagcaaaaagaccaaaaatagtttccctgggaatcgaacccagaacctttccggaacatcagcgaatcgcatttgttaacggaaaatcataaccgctagaccaggaaactgctcgaccactggggccaattgatgaatggacaggccattattggcctcatgagtctacaactttgttcccaattatttaggtccggagtaacagaacgaacttgtttcgccaaccttccaacattcgaaagtgggcaatactcaatccacagcggcgagactctcaatggttcttaatacaacggagtattctgctctgcataggaaccatctagacccaatatgaatcgaggatacattttcacttatgaataccgtatgctgccgagcgcatattcgaagctcaaaactacagtaacctgaagcttaggagtatttaccaggtcttgaaactacagtctaccccttgtggcttagatatatgtggctgaacccgggtaaccctatgtcaatacctagtcggccattgcctatttaggtaacaaaaaaatgactacggagtatgccattcgctatattccgcgtatctatggcttatcaaggagaaactaacagactgtgttcgaggtcacatgacctctccgctctcccaacaaccatttagtcccagcagacctccccacgcaactcaagagattttctagaccacctacgttttcatccgtagtactctagattcaatctctcacacctacgttgtcgtaaagcaaacagccgatggaagactgaaaagcaaggtacaagtgccaaacactttcttcatcgtgcgttcttattccccctccctttgctcttctattctcttctttttacttagtatctcttgcattattacatacatgagtatataaattcggcgaccaaaacggtgtccatctactcaaagagcctggggattttgctcaggtgatctgatgactggacaagagaggtgttctgggatgaagatgtgttgtgtgacgctgccgacgtggcctcctgatgagactgtctaggttcaggacctgggtcgtgtgtacaagttgatggattcctgaatgggagaggaaagaaggccgtgtgggagatttcaatacgcacttcccacaattgcgagaatggaaatgaagacatcaaacttatgcgttagatgtgattgagaaagcaatatcaacgatttttactattgcagtgcctaggccaaacctgcaaacattaatattagataactgatttatgtttctgatctcttcgaactcggcgacttcaatctagctttggtaggaactatgaaataagaaatcagttgcaaataggagaaagtaagggcattagtcaggtatatcaactcacgtccaacctttctatttctttcctcgttgctgagtagaagacatacggttgacaaaacgaatagcagatgtatatagggattagatctaggagatgcggcttagagatttctctgtagcctccggccaagaactcttccaagtccgtccgggcaaccccaaaaaggggaagtaagactggaaagtaaataaatgaacgactgcggtaaagttctgagagaaccaaattactcaaaaagcaaaaacatacaacagtgaggattcgctggtggtcacccacccaactactaactcaccggcgtgtggcttgagtacggctgagcggacgggaagccctattttccacaccctatggtcgtatgtatttggtatagcactggagggaagtatataatagctgataactatagactatagccgtgggtggatataacacggcttatatctcatcgttaccattgggtcaggtgacctctacgcctatatggtcatagcgttggatagatacgttaagtgctctcatgtctcgttaagcttcatttccaaaaagttactccatactccgtatattatatagagttctacaacggggcctaagatgaccatggtattgctatacttcattcacactgataaaacaaaagcaaaaaacatacaacagtgaggattcgctggtggtcacccacccaactactaactcaccggcgtgtggcttaagtacggctgagcggacgggaagccctgttttccacaccctatggtcgtatgtgcttgatacgacaacagaggggaacatagagtaatgaagtacaacttcgtaggtggtgaggggtgaggatggatgagaaggatgagtgcacaatgatggggtgagaagaggatcgatcaccctcgggcgaccgccctacccccccttccagctgaattgccgcgcctcaaccaagtcgagaattttagaaaactcctatgtgcttcgcttggtctaggtccttgaagtctggaggtgcttaaatgtgaggacgtagtcgattgcatcaagcaactgcaaaaagcagttgtagtttctgcagctgatcttttgcccgcacagccgcgaatttccggtcccattcagcgcattgctcgtcctcgatggtttgcgcagccgtccccttggctcctggaagtgtagagatacggtctgcctcttcgccgtggcgaccaagttccagataccgtaaatcggctagagaagaggaggttacattcactaggagagaatagtcagataggaaaatctgttattgtggacagtggacatcgtaccttgcgttcggttctttctcttatcaatatcaatggcaaaaaaaaatagatcagcacatcttcatcttcgcagtcgtcatcatcgtctatcaagtaatgacaatactgtgggaaagctttggtgtcaaacaggaagctgtcgcttaggacgacattcgcaggtgcattcttcagaatatgaaagtcaagagggtaaggtgaggtaaattcatcatcatggccaaaacgccattcaacatcataggccataccggccgtctcagtgaccgaattatcagcaaatttcagtcttgtctgatactcatgtctagtgtgaatgtgcaccccaatacttcgtgcgtaagccttgtccataatcaatacctttgagctagaatcagccagagcactctgtacctgaccattaatcgacccctcaaacattggggtagatgccccaaggtataacagatggaactgcgagatacctttggcgaatctttttttcacacgacgatagaaattgacaacgtttgagaacgtccgagtgagcttcaaaaatggcttcccaatgatcacatcgtggatgcagttggggagaagctggaattcaaggttgtgcacctcgttttcgctgctgagccggaatggcacagttgcagttcccgtagtcgtcacttggttcccactgccgatggtgatttcgcaagtggcattctggcttattggtaatcctaagctaatggcatatttttctttcatgaagtttctttttgccccgtaatccccaaccgcgttggtggaatgctctgcgagttgacaaggtatttcgaagatgcgcaccccgcgattagtggaaaaagcactttttgagtccgattcttgtaacatatatggccgacctagagtctttatattttcaatgacccaactacaaagttgggtttggttattgcgtatacgtttgtctttgctctcagtattgcgttattgactaatgctaggagaatggaaatatatggtgctacagccgcttatgctgcagtattagttgtgtctttttcaggaaattcaggggcagtactagcctgagccgtccagttctcgccgttctcactctctcgtcctattcacccacactcaccctaggagaatttacgttacggatctaaagttcttgagggcgcatatcaaattaaccgaacggactatgtgctatatgacctatgtacggccagtaaccaggtacggcccgagcgagatcctgcgggcggtaggagactgcagtgtcgatgatcaaagctgcagagaccaatcaatattaagacggaaatgaatatagatctgtgattggagaaaatagatagcacagtctaaccttttggggataggccgtgaatcagaactcttccatgttagtcgatcttgaatttataagcagtctttgggggccaagtgtagatagatatttagcggggtttcaaagctcattttgctttgcattctcaaagtcctcataccctaaatcttccctgtttcactttcacaatgtcggttggtcctgatcttgatgatgacgctgtattgaaatggctcgaagcggtaaggctatttcttctagcaaatcgcagcacaactaatttacagcgatatttagttccaccgagcgagcgctactctcaacaccgatcagtggcttgatgaattcatgaccgacgatgtggaaatgcaatatgcaaataaccctgtgatcaagggcagcgaagtgcggcagatgttcaaagccgtcctcggccaactggacatgatgacccacgagatccgctactttgactatgtcgcccctcgtatctatcaagccgcaaccatccgatatctcgtcaaaggagacagcctagacaccgaccaaatcactattccaggctttgctgtcttctccattcggagggacgatgacgggcgtgtaaagtgctaccgggcagagacattcctggaaccatcggcattgtttcaacgaatggctgaaaaatcaagccaaccttagaatattcgtggtaggcatattggtggttgaggtgatagacttgatatctagaccattactgcatgtatccatgtttgcatggtttgttgttctgatatatatttctaccatacaccaatgatctatttacaaatatgccaactcgtctgattgatctataaccaataactctgctttgtccacaattttaaaaaacgatgctattcccagatcaccccaccaattcatctgatctctgtacatatatcctcaaggaagtttcatttgatatagtcctcggcatgtcagattttaatttccttacttagttatgtggtttagcgtagtaatttttaatgccaaagactttcgtctttgtagaatttacccgctggccttgaatatgcatatgccgtgatgatatgggacccaagttttgctattttgttgagatgctaggtcttctactacttgctgctgaatgctgctgaatgctgcccaaacaggtgacggattcaagtcataagctaccttaattccaatatagtaaaaagatagatgaagtgctagagctgtaaaaatgcgaatcatctttaagtatgacaatgcagagggttctacctactgctctataactaccctatgactttacaatcctcttctactggtaagctcatacatacgaccatagggtgtggaaaacagggcttcccgtccgctcagccgtacttaagccacacgccggtgagttagtagttgggtgggtgaccaccagcgaatcctcactgttgtatgtttttgtttttgtttttgtttactcagtatagcaataatagcatgttcattttaggctccgttgtggaactctatacaacatacggagttcccgtcgcaaatgaatgtcaaagctgagtggagaatgagaagaaaaaaaaataacgtattcggtaagcgagctgcgcaccccaaccaacccattgacagttggaccactgggccttaaggtagatcacaaaaattgggagttccgagtgccgttgcgaagaacagcctggggtgatcattcaagcggccactcaccatacctatgcgccactacatttttatagacataatctcattcctcattccaaagccccgtcaccaatgaagcttctttgtcacactcccaatatacataaaaacccattctttggcgtgtgtatttcattctctaagtgagcgtacgctgcccacgtgatgttgacaacacacgcaggtaggaaaagaggattgaatgattggcgtcgggttctcacatgggcattagagctctacttggccaagacgatgtggccaatgctagggatggatcacatagggtgaagtcgaagaaataaacgcaattcgaataaaagatccggtgagacagttgtgacagtctccatcggatagcttatgtgccatacttaggcactttctcggtgcctcctcgtccatactccggggctgcctagcagtgattcccaacaactccttgcatccgttgcattgttatatcgtggcttggttccctaatgactgcaagtatttcgtcctgtcacaagtaccccatcgacgatctcatacataagcctggtaaccaaatgaacagtcactaccagccagcgccctccacttcccaaccccgctaacccctgaatgacccctcgaacccccaagtgctgaaaaaaatcgatcccgcaatcctaagtcaccatacttgggaccagaggagttcatttggccggagtgattgggcaatttgcgggaaggtcttatgcaaggagtgatgggttaatactcatattgatgattattgaggttcacgctgctaggagcggcaaaggaagtgcctagaaactgggtgtaaagttctgtctcagtggtatactctcagtacagccatgtaagggaggtgcaacgttacaacaacaaattctaacgagaaggataagatctgtgccgaggaatgtaacatcctgattatatatataaatattgatgattagtccgtgagttttctactacaaacaaagcatgacgatcaaacaggaagcgcaagtggtgctagcggaccctgctctgcttgaaaaaattgacaaattattcgcctgcaatgtgggagaatacatcaacctaccacaattggtcgttgtcggagatcaatcgagcggaaaaagctccgtcttagagggcttgacaaaattgaaattcccccggaacagtggtctgtgtactcgatttgcgacgcagatcatatttcgcagagatcctaacttgaaagcgcggataatcactggttccatcatctcggcaggacacgagaatggaaatgcaaatgctagttggagcagatctgaaattgagtcattgaatgagaacgaattcgagattatgatggctgaggtgggtcgatattctccctgaacataacagtcaatgaaaaaaagttaagcttctctcaaggttcatgtggcgatgggcctatcagcgtcaatggaggacgaactgcctacattttctgccgacgttcttcggttgaagataattggacctcatgaggatcatcttagtgtcattgatgttcctgggattttcaaaacgacaacacctggcttgacttcaaagtcagatatcgcccttgtgagggacatggtgctcaactacatgcgcaatcctcgatcaataatgcttgccgttgttccagccaatgtggaccttgcaacacaagagataatcgaaatctcgagagagctagacccgaatggaacgagaaccttacggatccttacaaagccagaccttgtcgataaaggtacagaagacaagatcattgaacttgtcgaagggaagcaagagtctcaagaattaggctgggtggtagttcgaaaccttggtcagaaggacctccaggactcttcaaagatccgtgatgtcgaagaagagatattccgcaattcgcctccttggaaccgtatctcaaacgataattacggtatcgaggctttgagaacgcggttgcaagcattattggcttctaacgtgcggcgagagtttccgtcggttagttcttctgaagtactggcatacaacgtctgatccgtgaatgagtgataggtacgatctgaagtctcgaaacgtctcaaagaatgcaaaagaagccttgcaaacctcggagaagagcgtgaatcccccgagcaacagagcaaatatctgctcgaaatcgtgtcaaagtttcagcgtatcactgaggatgctctccatacaaactatggatcgcaagatgcttttgacgacgaagctgatttacgattggcaactctagttgccaatcgtaatgcacagtttcctgatgacttttcttctcgcggccatgtatactgcttcaactcgcatggccatgacgatgactctgaaaatcaatcaagcaccactgcgacctctgcctgcgttggcatagactttcacgaagtcgaagaggaacgggagaactttgtccccaacagaaagctcaataattgcagcgatatcgaagacattcttcatgaccctgttcaaatccaaaattctctggaaaagggtattctcccttggatcgaaaagctctatcaggaatcccggggctttgagttgggaacattcaattcggccatcctttcaaccgtgctgaagaaacaatctgccagatggcccattctggcggaaggctacatttgtgatgtcatatctatggttcacatttttacgcgtaaggcattgaatatatcctgtggagatcagaggcttagtcaaaacatcctctcatttctgatggaagacctcactgagaaatatcaacaagccctttcaatgacggattttctccttcgaattgaaagggaaggaactccaatgaccctaaatcattacctaaatagcaatttgcaaaaatggtgagattcaatgcccattatcaattataaatcgctaatctctttttagtcgccaggaacgcatcacaactgcagcccggggggtatcagtagccgccaaatctgaggaccagcctagaaaccactatgttcggctttctgaccttaagcaaatttaccacatgagtaatttgcaacaaactgtgcaagacatccatgatatcttgaagtcgtactacaaggtcgctcgaaagaggttcacggacaatatgtgtatgcaagcggcagactaccatttggtaaccgggcctgcagcgcctatgaaactcttctccccttcctgggtctataacctttcacacgaacaattggaacagattgctggggaggaaatatcggtccggaggaagcgtcgtcagttacaaaagcaggtgaaggagctggaaactggtcgaaagattttacattaacgtgagtagagtaagttgaaatacagtctatatactagaaaactcaataagaatcagagaaggacgagacagtacagcgggtggggtaagctagggcttaatgtggcgccagattcgtggaaataaaccagctctaacactaaatcaaaagaaccgttgaatatgtagggcggaatttaaagaaaggtcgtgtagctagactcttagccttccaagtatatccatctccggttgatgtacgaggtgacgacaaagatgtcggaatacatgggaaaatattaatcaatagaacatcaacttcatcaatagtaacacatcaaagggactagttaggcatgctatttctaccatgtctgcgtattatgcaaacgtttgattcgcagatcctcaccgccatttgtgacagagccattttctgtagcctctttgtagtcattgctgtgagctccctctgttaggagaatgatgcgatccgagataatcttgtagagcggatgctctgttgttaacctcttttctgtcgcttctaacacgacttggtaggcattgattgccttggcttgctcctgttttttctcccataccttgcccaaactccacattacggtagcgtagtcggggtgctcgctaccttgaaaaatcttcatcttctcgatggtcgtgataatcagtttcacagcttcgtccaggcgaccctgacgagaataagttcgagcaagttccctgcagcccatcaaaaccccaaggtgatcttcactaagacttcgtttaccagcagcgatgccctcgatgagaatatcctcggatttttgcaactctcccatttcagtgtatatcttcgctaggtagcatagcgcctagagagtgtaggggtgctctttgcctatctgggccctacggccgttatagacttcctttatcaaggatattgcgtcatcaagctcttttagatcatatagggccatcgctagattgttcttcgtttcaaggacccttaagtcactctcctctagactttgtattcgaatttccagaaccctctgatgtatgtctctactctctctaaaccggtgctaagagcctaatgtgacacctaagtgatcaagcgctttaagtgtgtcgtcatctccctcgccaaggtatgcctgcattttctcggcagtttattgctgaagttgaagagctttataatattgtctattgagccagaaatagtgactaagggagtccatagctagtagagttttacgataatctggtcctaagaatctctgttgcgactcgacaacctgttcttgtaaggctatggcttcttttaagtgccctagatcccaaagtatactggccaatcctaatattgtgtttattatctttgcgtcgttcgggcctaaaagcgtaaccagcgactcctttgccagaaaaaggtaatatacggacttcgagaaatcacctttctcggcgtgtagaatcccacactttgcagcgttttgaatcatctcttgaattgagaacagtaaagtgggctggaatagtaacgtaaatcgacggtattttccaatgtgtagcctagagaattctctaaactctatcggataggcctctagacattcgttaaggtgaggaattagactcctccgaaaaatagtgtgggactcccccgtttccatcggagggagtggtatggaggccatgagtgtatgaaaggaaattattgcccagaggctcttctccatagggggtatgcggtctcttgcccaagcatggaccaaaggatgtaatgagaaactctgttcgtcattttcatatgttattaatgaggacgaatacaactcgcgaagagcctctctgatgtacaatggatgcatatcatccgcgctttgcttgagtattcggggaagtgcccgaggtggtctgaagcgactgataatagcttgtacaaatccttcccgaaggggtctggttagatattgacgcaactggcttcgcttaaggctcatgcctctttcgaagatattaactcgtatattatcaaagtgatagaagcttacaatgttgaggatctctactgtatcttgacttgggatcgtattattggatacgatgtgttggaatgaaaaatcaaacgcggaatagatatcattattctcgactttcccaccgataatatcttcggtgtttgaaacggattttcttctctggcgattttttaagaagcgtctgtaaaacccgaggtactcacttaagttatatattttgttgtaaattgagttgcctgcctgaatgactgtaagggctaaatatcccagtgtcttgataatctcgtttgctgccgtttccgaggataaatcccatggcggtataatatctacaactttcatgagaaggtggagagcatctctttgcttgagacctttgacctccatactcccgacgttaccttgcctttgaagactgggatttcttgtagttacgaggatatgacctctttctctaggcacaatgaagttttcgaactttaggtcaggcttgtccgcgttgtcgattatgagcagccaattctttcgagcttgggaaagaaagtgtttaccggagacttcggtggcttcgagaccccccatacgtccgactttacagaataattctttcgcggtttgggccgaagttgcatcgatagtgaagattgcctaataactgaacaaagaatatgtcagtgagcgagattcgatatttaggtgctcgaatacttactgttgtcggttgctttgggcatattttgcagatatttgtgtcttcccagatcccccaattccatagacgacaaatcgcttttgctgtttatccatcaatgtctggtcttctggttcaaaggcaccctggagtgcattcatgatgtcctcctgacctataaaatccatggaaacggtgtatggtgggtggaaatgttcattctgcaaagcggcttcgatagcttcagtattgctttccgtggggatcgggactttatccggaatttcaagaaacaggcccgttaattcacaggcttcgtttcttcgcatccgcatcattgatcccattgcctctttccatcgatatgtgacaattgctggagccgagtagcagtacttcatcagggcagatataactgtccgataggcagagtcagattggtgaaacttcgtcatatctgagtggttggagttcggaattccacatctttctgtatcatacagatgtggagcggcagaggacgggtctaccataaactccgcgccgctcgtaagctgtgttctcagcccctcccaaaaaaggtacatgtggacctccttcatgagtggagcgaactgatttgtgatgatgtctaaggcatgcacagtgattggcatttcaggcatgctaattctctccttcgctcggcgagttaagaagttcgatgtcgatgacgatgtacttgaagcaatccatttcccaacatcgatctgatcatggggggtgctgaagaacaagatggcaaaagtcgagatatatatagcattgaggtgtgatgtgaaatgggatgttcgactcgctgaatgaacgagcgcactcttcacgatgatgcctccaagtctgccactagggtagttgcttgactctgaactctgtccatggagtcttttccagtataaagggaagggcttgcgtcataatcaaatgtgagaactcgtgcgttatggatactccgtggcagaaggtctctcagccacaaagtacccgtttcatgatgtgtccatgtctctaacgagtttttccccaagccatggaccgcgacgatactatagaatcctttgttagcgatgtaatacgcccaaccccatagagacgattaggacttctcactcaacaccagcattctgatccaaatctgccgcacgatggctaatgttgtgcgaatgaagtacatgaaggcctaatggcatcgcgcaaggttagatttctgatcgctgtttacagagagacatgtattgacatagcgatgataaggagctggactcctaagcacgtgcgggagttcatgatgggggaattgagaacacccgggcaaacgcatggaatgtattctgaggcatatgcacgatcgacccatcaaggttgtgatctgcgtgattctgagcctatcgaaaaggggatttaccgttttctccgcccttgtcttattctcgtgtaatataaactgcattagtgcttacagtgcatttcgcctatgaattgggcgctaacagccacctatattggaggtactatatacaaaacttcttcccagccccccaagaccttcgaaatcataacaagaattaagaaaatatgattgagaagtatctgatctgggctgtcgttacgtttatcatttgccaaatatgctatcgctcttttgcaaaattcaggagctatcgggtatgtgagaatgttgacattttgagttccattgctgatgatttgccggcgtgattctatttggggatcccaaaagggctgcgaattaccactcgaacttccaaagagatggccatttggaattgatcgcatcaaggatctctgggaaacaaacgcagaaggtcgactccttgcatatctttgcaaaatagcagaagattatgagccccagaacaacctcactcaatatctgctgtttggacccagagcctttcacgtgttacatcccaagaaccttgaggtcgttttgtctaagaacttcaaagctgactatcctccatattctgcttttcaaataaaagcataggctcgttcgctcactggtgttttttttttttatcagattatgggttcggagtcaggccccaaattttcgcgcccctgcttgggaatggcattttcactcaggaggggtttgaatggcagcattcgagagaacttctgcataaacaattcaagaatgtccaatctcagaacttcgaccagttccgcgaacatgtcgacaatctaatcgatcgtctaccctcaagtggaggtgttgatctccagcctcccttctttgatttgaccatggacatcgcaacggctctcctttttggtagatcggtctacactttgagggctggtattgaccagtatcaacataataaactctttgcagaaagcttcaacatcgcgcaagagggccttgccaagcgcttcaccttggcataatctctatagctcagaagccttccggaaagcatgcgctaatgtccaccgctttgtcgaagaatacattacggagtttgatttggagaccgtggacagcaatcaagagaaccgatatggcttcatcaaacagattgctaaggagtcgtatttggggaccgcggaaaacaacaacgagaagcgggctgggcccaacaaacaggctattgatgagtccgaaaggatgaaaaatatacgtgatcagctactggatgttttgctcgctggaagagatacaacggcgctgtttatcttggacattgtatgtatcacacggtcagagatatcttccaggctttccgctcgtgctgaccatattatgctgttggtaagtcgactacttgtccgtcatacgagtgtcatggaacgtctgcgaaaagagatctcttctgtcatggggaccgagtccataccaagtcgggaacagataaaaaagatccgatatcttgattctgtgatcaaagaaagtgagtcccaattgtctgtatttttggtgaaacaggtagacatctaattttttccgttaggcctgcgtctatatccccctgttccactgaacaatcgcgaagcagtggaaaccactattctaccaacaggtggtgggccaaacggtgataaacccatcttagtgaaaaagggtgaacttgttgtttattcacagtacgtgaattcaagggaaaaaaatatatacggccctgatacatatgaatttcgtcctgagcgatgggaaaccggcgaacttgacaatattggctgggcctactttcctttcagccgcgggccccgtcaatgcttgggggaggaatttgctcggatggaaatctcttacacaatcgcgaggatgctacagacattcccgcagattatgttgccatcgggagagccaaatcagcctgtcggaaccgaaagacagcgactaacattagttctctcgagtgctgaaggatgcagagtggaagtccttaaaagatagtcattgggaatggggctcatagagaatggatcgtatatgggcggctatggaaggaagagagatttacatagtaaggaggcaggttcttgtagacagccacccacctcaagaatcatgtatcgcgatatgtagtacaaagcgaagtgtttcaccaatcatttttcattccactagtgtgtacgctaatgcagtacaaattgggtcacactggcgagatgtccaataaaaggccaatggtaagttccctccctcatgaggggtctgaataataccaaaattgcacttcaacctaccttgaccaactctcaacaacattattactccacattcgacactcaacttgaaaatccatgacaatgagtcgaaacaaagaatttcctaagcaaatttacgggatccaagagttatatcgatcgtgtggggagccagttgaggttgagtgagtgcttagttatcattgaaatgatggatctcgttgacaataactagcattgttgccgtccatgggctcaatggccatgcgacagggtcatggacatccaagccgcaagaaatatgttggctgagcaacgcatctttcctcccgagatacatcccccgtgcccgggttttagtatggggctataatgcgagcatcttctcacagaacggaaaggcacccagcgcagacagggttttacaacatgcgcagacattagtctctcaactagaggctgatagggatgtagggaactgtccgagtctatatgaatgaagccctgctgacggttttagctcgaagatgcagcgaaaaggcccatcatttttgtatgccattccctaggcggcataatcgtgaaaagagtaagttgtttaggattgcatacaaggaagttgtaaagaccaatattgttcccttggctaaccatgaataggccttggcgtatgcagagagtcgcgttagactcactcacatatattcaatttacgtttgtacatttgctatcctcttcttcggcactccgcatcaaggatccagcaaagcgaatattcttagtagtcttcaaaagattgtatcgattgcaacccccaaagccgctatagaccttgaatcaggattggtcaatgcactcgagaaggaatctgaagtcctgcaaaacatcaccgaccaatttacaccgctcatgtccaacttccgcgtctttttcttctgggagcaagagaagactgatctcaaataaaaaagagattacatcgtcactgaggcgagtgcagctccaataagactcatcctttgcgaacctttacacaatacgtctggtctatggtatgtgtgcacgcaggcaagttgttgccgtttgtcttcaagttgtgtactactgttataatgcttgagtggtgatgaatatttcctaaattcatatgttcttgcttctttccccgttctcacattaccgaatcttgagagataccatacatctgtagatactgttgacgaaattcgtgtagcgtaatttacactagactataaaaagaacgaaggttcttgcttagggcctagaggggccatatcccattcttgacagctgttatactcaatcggtttaaccaggtgaaaccccaacctcggggacagctcgagtacctgttgcgggatatggcatttaatttgaagacatatctctcttcagtacatagtactagacccagaccacatagggtacagagtccagacactaggtatgcaattgaaactttcagactttaaataagcctacgctaaagtatctacggcccgggccgtgacggaaggcttgcagggttatttgtatgtactatagtgtacattattatcattattattattattattattattattacacttggatatcaatggaaattcctgggtttccgatcggatgggggttatagaccaataaataggacaaaaatagcaaaaagcaaaaacatacaacagtgaggattcgctggtggtcacccacccaactactaactcaccggcgtgtggcttaagtacggctgagcggacgggaagccctgttttccacaccctatggtcgtatgtgctagacatacaactagagagaaatatataatgcatgtagtttatgagagggtcctgcaaattgttggcatacaacattgtatgttgtagtcgaaaatcacgactggcacagtcgtctaacctaattaggataggtcgatcttggcactgttatttcattactccgtacactccggataacatcagccacataacgagtacttccttaatgatctcggcggcctaagagcgaagggactgattctaacttctaatgctgcgcaaagccccctcttactggcttattggctttttgcatttgataatgactcatttcacaacaaacttccggcatcatccatcgcgcaacctatggagtttgcgtttggaagtccatcacatcggcaacccatgacggcaagccgcctaatgcagctgagacttgcccgccttcttacttgtggcgagagcaccggccaggccaaattgagaagagacaccgttaatacgatgagttgagttcaggttcttgactacaaccatctggtaacaggtggccatgccttcccgagaggcgataacggaccaggagaggaacagctcccagatctagggcatgttagacttcatggaaagtactatggtagacgggggaaaccttactctataccatctggggccatatttggccttgattgcgtccacatttccagtccagttccggtaccatctccagagggtaccggagtaatgaacaccgacagtatcaatgctggtcattgtcagtaagtgcacttgcgaggacagtcctagagcccaagtaaaactcaccccttgagttcgaatccagcttgttccagacacttgacatagtaccacagaggagttgaagcatctgcgccacggaagatgtacttgttcaaatacagaccccaaatgaaatcttcgtactgccacgcctgacgcagacctgaaagctgaacatacatagcaccgtcgtcattgagcatatcataacactggcggaagaacgtggtaagcttccggataccaacgtgctcgcccatttccaactgcgtgatcttgtcatattttgtccgtggaatatcgcggtagtcgaggcagagaatacgactctgttgttcaggaatccccgccttgcggagagcgtcgttgccccaagcggtttgattctccgcgatagtaagtccggtaactttagcgccgtagttgagactggcaaatttagcgaaggttccccagccgcagccaatatctagcatggtctcgccttccttgaggccaatcttctcgcagacgatggccatcttgttatcttgcatttcttcgagggtctcctccttctccgggtctgagatgatgccggaggtatagatcatgcgagggccaagaaaccaagcatagtggtcgttaccgcgatcatagttgggacggatctgttcctcatcttgggctttggtgtggaagatgatgtccttgaaaaaggtgaaaaagatgaacttgaagaggtccaaggtaaaagagaagttcgcccagtcgtgacggtattccatgacctcaagtgcgtcgccgttgaaatccaccaagccgtccaggtacatttccgcaaatcgctggaggggaactttgttctttccgtgccatttcgctttatccgcttcgcgcttgaaggtcaagtaatattcaatgggtcggccgggtagcttgactttttcgttggtgcgggggctgctgctggatttccaggaccagaatacaaccaaaagaggaaggaagagaaggattaaaaggaagaagaatgtcttctgacctccattgagcaggtaggtaagaattgtaggaattccgacgaggacgccgcctaggagaaggttcgagaagctttcatttccggggccatccgcgggcagcggcgcattgtgaatggctgggaactatttggagagattagccaggttgaaggcaggagggaggtcaatggcatgaacacacgtttgtcagaccaattccacagtcctctccggtctggagcttcgcaggtttggctgcaggggtcttaatgaagtcgatgtcgccagacagctcgacttcgttgactcctttagcactcattgtcgattgttctcctatatgcacaatcgaggatggggaacgagaaaccatgtattaatcaaagagaagacgggaggggatatggacatcgtgttcgagggtattatagacctgataaacgcggtaatcgataagagttagggttccacatgtgggtcatcggtccccgcgggccccgttagtgtacacgttgcaggcactctcaggttcaagtctcacattccaaatgggcttgctttgtcaacaagcggactgctctcaaagacttattggaccaacttgtgaatttcaatcaaggcatagagaccgaagaggaagcccagtctgatgggttttggatctccacgacttttgtccaggtgcttcgcccgcccatggaagtttgatcctccatctattccaggtcgcagtctttaccccttgccccgaattgtgacaagtctatcgcgtttaagtgtcttcgtagcttttttgcttttcgccgaaagaattattgcaatgcctaagttgatcccacgacggcgcatggtagttgctaatccatatggcccgaatacacgtccactcgggtcattccaaagctgcccaagatgcaaagcagcctgcaagcagtgctgcatgtgaaatctgttggaccgcaggccatctaggagtgactgtcgttgttcagttcgcaacatgcaggagcctgcaataaccagaggaccctggaatatagcctcataaggtgatctagtggcctgctctgcgtatagcatgacattgtcgatatgcttctgtactttcgccaatgttacagtgtcatttaatgcatctgggaccattgcggtcctgagatagaggagggtagcctcccggcagagattgagtgctgtatcccgttgcggctgcgatttctgaccattgactgcagaatctggaggtttatattctgttattcgggcgtagagtgctaggtgcatctctaagctcgcctgtgaaggggttttctctgtgagacgtcgggcggcaagaactgctatgtcgggcagaatttcgaataagccatctgtgtcgccgaagacgactccccatgtgtcgaaatggtccattgtgccgaggatgccgtcgacgaatgtgtcttgaagcacggttcggcgattgatagagccgtaggggacgatattgttactgagaattaaaaaggatatatctccaacacaaatgcaaacaggcgtccgttgtcattgatgcttgacggtaacgagctgttggctaattggataatgatttggcggcttgcgcggaggtggctgaatattgccccttggtcgtctccagatagcgtctagacattgcattagtgagccttttgtggacgcgaggcctaagaccatgtgtttacctcgaagaacgttagtatcatcagtgtcaacaacattcggagtgcctggggtacatcgaatgctgtctggtctgaaatacgatcccgaattgtccttatcacgaccgagtaatgtctgtatatcgcgagagatacttcgagcccagggtttcgggacttcatatgggccccactaagtgctagcaatgaatgcatgagcagctcatcattgcggcacagaggtacaagtagagtcaccgacgggttattgccgtctggagaaaaggaagacagaacgttggccgtttcagttatgtaatgtgtaaagagaaggtttgatgcctgtgtaagcgttgaagctttcgttggagacacggacgaagctgtgagactcgaccattgagccgatgggtctctgggtgatgggtcgagccggtctggactattcttataaccttgtgatgcagcttggactatcaatttctgagactttgagcgcggaccaacaaccggccaggcacattgtaagctgtttcgtgtgcatccaacgcattttggttttctctcatcgcattttttcttgcgctggcgagatgtgagacaccctgtcacggagcggaaccggtgttgtttggcaggggcttggctcgtccggggtgtcgtgggctctgcgcctgtcgaaaatggcgccagcatgttgtacacgccatatgcccttgcaaagcgggattttgggctaagctggtctagaacacaagggttgagagaggcaagaagtcggctggatcgaagtctgtgtcgatctgggcgtgcggcttgaggccccaactcaatccagctcctcttttgtggcgccttcttatctgtaggggctcatgtggataacccaatatcaattcacactccagttcggcgccagcggagcggggaactcatgtatagaccgctttcgacaccgctctataccgtgcactgtaaattgaagctattcctatagaccatacaaatcatcagctgggcgtcaagaaccacctccgaccgcacaaaatgggaaatatgtatggtgggaatagcttcaatttttggactgagttccaaggttagacactttgctttttaagcccgctgtcatgataattcaggttattttgatttctgctagtctataattcaggcatgctcagtaattaggcctgaaaaacctggcattcgatcttacaattttgcccgccgcacccccctttccatattcctccacttatatacaaatttacggaatgccgctcgaaacaagacaagatcatcatgtgtggatgctagccactcttgccaactggtactgggaatgcttcgagaacaactgaacggtactaaccagcttgtccaacaggaactcaacgctgcgttgatccatggtctcctcagtagctgtgaccataagctcaagctgagatccgtgctccacagaaatgatacccagctgaccgtgcgccagcttggagctggcccagtcgcaaccagacgacgagcgaacaccgcccatctcgaagggctccgcagattcttcgctctggtggtgcacaagacaagccatttttgagccaggttgccactctgtgcaaaattctgcgattgcgtcaaacgatgcctcgtcatgggtagtgattgctaactgctgtacctggacgtgatgcaagaaatcctccaccgtccagtcaggttcaattctgattcgaacgggcagatgattcaagcagggtccaatggccgtattcgcgcccaaggaacttccacgcccgtgcacaacctgacctaaaatgatatcagatcgcgcagtttcctcaaagaggacccatgagagagctgctttcacgagcgttgacacggtcatgtccggtgcgagagagggcattgccacttggcgcctctcgactatgtcattgcctgagattcttgccttcccagtttgatcaagggggtcaagggcagcggacggagcaccttgaagatatcgttgccagaatgaaatctcggctttgttcagatcgcccattcgcctataagcgacatccttgaattgtgcagccggtgtgagaggctcattctgataggcttttttgattgtctcccacagcaacggtatggaggcaccatcatactgcgcatgagatatgcgaagaatcaaggcagagcactgtttgatgccactagtcacgagagtgaagctgactggcattataccctgggctgtagagggtggatccctttgctcagactctcgagcaacatatgcctctggatcatcacattgaacaacatttagcacaggctcaacttcccggaggatcacctggaagaaccggccattggcctctatgaataccgtgcgtaggatgctgtggtgagtcacaacctgcctgcacgtgctctccagtctatcgatttccagggctgctgggaacacttgtgcgatcgagactggcgatgaatgggttatgtaaaaaacttggaatgggagcgctgggatgatgtcttccacattatctttgaccaacgaaggtcccgctgcggagtgccaagcaaaaagttctgcatgctcgtcatctgtaatcagagaatagggtatatggtgctgcgaggaagaagctgcagtctgtatcccatctatgatatcgctggggttcaagatggtagcatgctcgacaacgcgcattatagttttccactggaacaaactctccactgaatgctcaatcccggctgcccgagcccttgatgcggctttgagagccgagatcgaatcaccccccaattggaagaagctgtcctcagcaccaatatcatcggctgaaataccgagtattttcgcccagatgtgctgcaattcccgctgcgttcccatggtgggcattcgcttatctgaaggagcttcagcgaacaatgactccagctgaacacgcgttgcgctcgccgctgagtctctcaaccgctttcggtccactttgccactagcggtatgaggtatccgtcgaagcggcacgaaggcagacggtaccatataatctggaaggatgtcgcccagttggcgtctgacactagatatctgggccgtaaagttggtcggggcaacaatatctaaggaagcgatagacgaaatcgataccggtgacgccatctcagccgatttcgaagcgacaaagacaaccaaacatttggaattcatcgaagccatcggagtcacaatctccgccacgatgtccgtcagatcttcgggccaaatctcctgcagtcgcttctcaacttctgcaagctcaaagcgttgacctcgtagcttgacctggaggtcctttcgtcctacaaacgagagagatccgtctttttcataacggacaaggtctccagttcgatacacccggccaccactagtgaggccaagacgttgcatccatgttggacatgagataaagtttgtagctgtttggtccggactgttcagatatccgcgacccaccagaggcccttgaagaagaagctcgcccacagcaccaataggagcgactcggtggggattccgtgggtcggtcacccagcaggcacctgcaatcgggaaaccgatatttccgccttgcgagttaaagtcaattggggactgcacagtaaacacgaccgtgcattctgctggaccgtaaacgggcacgaggcgtgcaaatggcacccactgctggatgtcacttgaccgaaggggttctccaccaagcatgatcgttcggagtgatcccaactcatttggtgtcattgcgcgcaatacactgggggttaaatgagcatgagatggttgtagccctttcaacgcctcggtcagtcggcctctccgctcagcctctgtcaggacgcagatgcaagcacccgcaagcaatggaccgagtatctccaaaatactgacgtcgaaagcataggaggagaagttaagcacgcgggaacctgggccaatatccatcagacgagaaacttccctggtcattgtcataaaagaaccatcctcaatcacaacacccttgggtttaccggttgagccagatgtgaaaaccgcataaagagcacgatcggtaccaaaacgggtcgtctcacgatctggcatcgatgcgcactctgagtcgatgctctgaggcatgatgacgacattgtggaacagcgcctcagcttcctgaagatgctctggcgatgtaagtatgaaaggaggctttacctcctcgcagatattccgaagccgctcttgtggatgcgaggtgtcaagaaggacgaaagctgcccctgccttgagcacggccaacaccgctaccacagtccagcaggaccgatccaagtatattggaacaaagacctctgatgaggctccctgcaaacgcagaaggccagcgatgttgctcgaaagaaggtctagttccttataggataggctgaggttggaagacgagacggctatgcgcaatggttgcctctcacaatgctgggaaatcacatcagtgaccgataacggacatcgtgacgggaatccaatgttccaggcttgcagctgctggatacctttgtcattcagtgtagcaatttcgtgcaccagtcttcctggatgatggtgcacctgctgcaagatgtggctgaattgatctagcatatgttccacttgccatggtggagtgacacgctcatcagtggacatggcaacagtcaccagatttggcttgagcataacggctagctggatggcatatgtatttgacgcagcatccccggacgatgttcccatgggctccatgggatcattggcggtgcccaagttttcaacctctcctctcccctccacaagaagggtttggaacgaacaggcctgcttggcctccgttcctatggcagcaatctcagacagcccaacttgctcgaatggaatgagctgtactgtgcgctcctgcagatctcttagggcatgtgagacggtcgcattatcatcgatttgcacgcgcaaaggaagcgtggcaattgtcggaccggccatgccctcaattccattcacagatgctgctcggccaggagacacaatgccaaataccacatcgtcattactctggtaatgggactgaacaagagcccacgcgaaacgaatggcggtggttcgactgacacattcatccatcactgggccggtctcaattgttcgtaccgtctgctttgaagcttgaggccggtatgatgcggacggaagtgcgggaaatcgctcggccgtcagtccatggaattcgcgacgccagtgttcgagcgcgtctttctgttgggacatggaatatttgataaattctttgaatggagtcatgtcggagggtgataatgcctggccctgataggcctgttgtgcacgatgcacaagcagaggcagtgaccaagagtcatacagagcatgatgaatggtgataatcaggtccagtcgctgagccatattggaatcatcgctcatgactgggacgacttcaaactgcaccagtggctgacctagaagaacgttccagttcaactttttgtgttcctccatgccccccgagatccagtgaagctcgctgttctgtaccaggacctgcatgaagccaaactccgactgaatgaatcgcgtacgcagaattccgttgtgttctgctacggtctgccaagcggtcttcaataaagacagatcaatacctggccctaaacggaagcgatggtatgcgatatatgacccgggacgctccgctgtcaaagctaccataccggcctgcaatgcggtacaggggtatacgtccgcgatttgctcaatcggaagactgcattgttccattgcctgcgatttcaattcttcccggttatttgcggggagtattgagaatggaggcacaggatcatccaattcctttggtttggagtttggccgttcctttggccccggaagcgcgcaattcagtgcgaggtcgctaagcttggggtgcaggaagatatccgagacacctagttgaatgccttgatcgctagctgtggcagccagcctcattgctgcgatcgagtctccacccaagcggaagaagttgtcgtcgggtccgactgtctccgcagggcgagccagcacttcagcccagcaagtttgcaatgcaagttcgccctttgtcatttctctcaactgtcgtaggtggtgactggtcgccttttggccaatctgggatcgtagcgcttgggatgctgcgtgtcgcagttcttttcggtcaatctttccattcaccaatcgtggtacctggtaaacaggaatgaatgccgatggaataagagaagctgggacatctgcccgaagacgtgattgcatctgctccacggccgcctcgaaggcttgaacatcgccactgtcttctggttgaacaatagaagctaccaagtgtgcatctttgggaccatttagtgcgatcaaatctgcaaagacttcggggtcgttggtagggaagcactgctgaacatggtgctcaacctcagcaagttcaatacgctgtccacgcagcttgacttggcggtctttccgtcccatgtattgtatagatccatccacaagacgtctcacaaggtcacccgttcgatacaagacgccttttctggacgcacggatgttggataaccaaatgggatatgggacaaatgccgctgccatagcctccggacgattaacgtaaccgcgaccgacaataggaccatcgatgagtaattctccgacagcacccacaggcacgagcttctctggcttgtttggatgggccacccatgcgacacaaccagcagggtatccaatgtttgattcatcctgtgagaggtattgcggtgaaggctgggccgcggcaatgacagagcattccgaaggaccgtaggcattcatcaagcgtacatgcgatgaccagcgacgaacatcgtccttcgtcatgccctctccaccaagcacaagtgtttccaaggtcgaaacatgctgcggatttagaatgcgtgccacagaaggggtcagtaacgcccaattcacttgcatctcgcggattgtatggcccagtctctgatttcggtctgtatcggagggaatgcagatacagccgccgaccaaaagcgtgtcgatcatttccacaatgctggcatcaaaagcgtaggaggcaaattggatgacccgggcgtttctatcaagacgaagtacctgggtatgtgcggccgatgctgacaggaatgactggtgctcgatgacgcttgcctttggcctacccgttgatccagacgtgaaaacagcatatgcggcggactttggattggtcgccgatgggataatgtcttttcgaatccccgaatgagacttttggctgagttcctccacgatgatgggatttggcgccagattggctgcaagttcaaggtacctcgatgaggtgatgattactggacactggaagtccacttgcaccatctcttgcagtctctctgctggatgcgatgggtcaagcaagatgaatgctccacctgccttcatgatagcgattatggcaacaattgtccatcgggatctctcacggcatacaggcacaaatacctcggggccgacaccaagcagtaccaggtccgtagccaatagtgatgataggaagtcgagggtctcatatgtgaactgaccatcccaggaatcgactgcaggggatgagggttgcgccgtcgtcattcgttgtatgtcagtgtgaatacaagatcgcacagtttgcggtaggttgtaattgaaacgaagcatttgactctgattcttccccattgataagttgatgtcgcttaggtttatgatcgtgggatcaattagctgctggacgatgtgacaaaaggtgtcggccaccaattcagcctgggcttcagccacagcgtgcgtccagtatgtcaaatcacaatcgatggtcttttcacgcgaggtgatattgatcgtgaggtcatactgtgtttttgtgagttacttcgttctgaatgaaagtttttgggggttagacagtatcctcacatacctcagttgaatcaatcccatcttccggttgcaatttaatcttttcagacttatcagtaaataaatttccggcgtccttttgtaatgacatcgcggtattgaacaaaggttgaccggagcgcctcaaagaatgcatgacctctgccaaagagcaatgttggtgatcgagactttgggcataggccgcatgattttcggcaagcgttgagagaactgatgaatcatcagccaaagataggcgacaaatcaacaaattgattaaaggtccagagatgtcgtgcgcatcttggactggtatatcacgacaagcattcagatacccgaagcatacagactcgcttcctgtgtatgcacgaagaacaacaccccaagcgacctgaagcaaactggaaatggtgataccgtgatcccggcagaatgaggagagatcttgtccaatactcatggagaatggcaacgatttcagaaagcttggggcggttgcatgctctttcagtccaagagatggaaaaacacatgggtgaacatcagtcaggtattccttccaatatgattccgaggccctatggtcccgagtcttcagataactcaggtacctgctatagctgcccgcagactcggcgtctagtgtcccattgcatgcttggtggaattcagacagtagtctttgctcagtgataccgtcaacaagaatgtggtgaatagccagctggcagtaagccccaccatcaggctcaattgcgaccgtgagctgatgtggtgggcgacccttcgtgtttgatgattttggattcaacaagaactcatccgaaagagacggaacttggccctccgcgcgcaattccgatcccgacaataccttgatgtttgcctcacaagtcctcagaactacctggacaggatgaccgtgccctttaacaccatcggcgaagacagtgcgcaagatgggttgacgatcaacaacctgctgccatgcttgctttacttgattggtatcgagtgaggagttggctgacgttgggtgcagagaccaccggatgtgcgaccagtatacttgagggtttcttaattggctcaaccacatgccgagttgaatgggcgagcaagggaacatatcttcgattccagacggagatacatcaaatcggcctgagacttgatggagtaggctgtgaaggtgctcttcgcttgcaagtgatagcaacggaaaatcgacagcggcgagttgctgttcctgctgcagctccatggggagttcctcaagggtttgttggcaattgctgatccattgatctagtcggtcctggtgttgtaattgttgattatagatgaaggacaagttgagggagccgttcatgacggttgcgttcacatcaatgagagccatgcgcggcaaatcggctgccatggggagaagggagtcatcctggactgatgtcatctgaagaagggcacctggtcgctcaaattgttggaaaagaccggtgtagttgaaaagaatctccattggggaatgactcttgaatttttccggtccttcagggtggaggaatcgtgacgcaaaatatgcccatccgttcgtggatatgctgcggcggccatcttttgtcatttgcaagatcctcctgacgttgtcctctttcttaacatccaaaaataaaggtgcaatagtggtgaaccatccaactgtgcgggatatatcaatttccggatcccatggctctcttccatgcccctcgctgaacatggtgggtgcaggtcgattttcaaaggcctgaacaaaggcgtaaagtacggctgcttggattatttccactggctgagtatgaaatgcgccatttgcagcaccaattattgcctctgttgtttcccgcgataccgtgatggttcgtcgcgttgcatccgcccaggtattcgaacccaggctagcctctgggccccaatagtccattgaaggacgtggtatttctgtcctcaacgtttcactcggatcaagagactgctgggcatagctttgttgaagccgggaccattgttggaatgatatggataggggttgtatcgtacggcccgtgttgaggatgtcttccaggtcttgcagaaggacccgccatgacacgagatcaatcacaagatgatgggccatcaaccccaagaactgctccccggcatccgtagtgataacgtcaacaacaatcatcactccctgaacgatatcaagcgtgttctggctgattgaaaaaatcttctgcaaggctttacggtcattcatagacggcactcgatgctctctaaaccgaaggcttctagacacatcagggccaataatctgtccccattggccatccgctcgtttttcaaaacgggcgcggagcattgaatgagttgcaacaatcttctcaatcgcccgtttaatctcaggaggtggaagtggtgtgtcgagccggagaatgaactcaagagtaaacttgttgtgaccatcgggcactcgctcaaagaagagcttctggatcggagagagttcaaaccacacctcggtttggtcatcctccgcggctgaggcaaaagacacagatccagaatcttggatcctttctgccagttgtctgatgcttgggaaccggaagatatcagcaacagctactttgagtccgacggtgcgacatcctgcagcaacttgcatcgcgctgactgaatcccctcccagacgaaagaagctttctgtagttccaatttcttcaacagtccgatttagtgtattggcccagatctgttgaagtttttcctcgcgagaagttgacggcgcctccggttgaattttcacagctcgatatgccttcatctgctccagggacagcttattggcgtgctcctggatggaacgtcgattggtcttcccagatggcgtcagaggtacatgcgatagaggtaggtaaaaccgtggaatcatgaaagatggtagaacatccgacatgctagtctctgctgcagcacaagcttcacgaaactcgtcggttggaggaaggaactcgacttgatgactgccgtcatcatctggaggcgacgctgggagacatataaacgctatcagcaatgcctcgggtcgatgttcattggcactgttgcgaggaaacgaccggcgaacatctgcgagggtctggctggctttcggaaatgctctatgaagatggtactcaatgtccgccagttccaagcgctgtccatgtagcttgacttgggtatccttccgtccaagatatcggaaactaccatctccggtagcttgcaccaaatctccgcttttgtacaattttccggatggaggggagccaaattgcaagcgccagggaggtgcttcaacaaagacccgggccgtctgctcgagatttgatagataacccttgccaacgatcggtccttctattaatagttctccagtgcagcccagtggcatgagcacccgatgatcttccgggtgaacaacccatccagatccacctgtgctaaatcctatatttgctggatcgttgctcttgaggtttggttggacactgaacactgctgagcattccgctgggccgtacgcgtttccaacgtgcacaaaaggctcccagcggagaacatcgctagccaaaactgcttctccgacaaacatcaaaaccttcaaggacttaagactatcaggactaataatgcgagtgacactgggcgtcaagcatgcaacgtccacttcaaagcggttcatagattccacaagatgaccgtgacagtcgtccgttgacggaatgcaaacacagcctccttggatcagtgtactgagatgttcgataatgcaagaatcgaacgctggagaggcaaattgtagcacacgcgactctggtgtgaagtggtatggcttgccatgcgccacagaacttgacgcaaagccttcgtggtgaacaattacacctttgggtgtacctgtggacccagaggtgaatgtcagatagacggggtcttgtgggctgatcgccgacctctgagatgagctattgcactgcacctgctccgggtcaaaagtatccacgttgagcaacgcttgaacgccaagctcggccgccagagcgatatgccagccgcaagtcaataccaggggagctgcaacagcttcacacatattccgtaaccgggactgtgggtgtgatggctctagcagcacaaaggcagcaccggatttcatcacagcaagcatggcaacggccatccacttggtttttcccaagagaagaggcacaaatgacccagggccaacacgatgccaggaaagatggtcagccaatgctgaagacaagtcatcgaggacttgatatgagtagctgccatcccagctactgatggccggggcaaagggctgttgtcgtgtgcggctttcaatcagagaatggacacacgggatgacatcagggcgcttggtcaagatgttctgtcgacgcagatcgctcaaatcttcggggctcacggcactgatgttggaaagtgtgaggcccggcttagtgtcgatctgctcgtaaatatgaatgaattgggagagaatccgctccatttgacagacctcggttgctgccggatcaaaagaagcctcaatccacattgtcacggctgaggggcgacatcgtaggaccagaggatacatatcatacgccacttgggtcgatcgactctgggagaatatatcgggaagttgatggccatctcgaggctcgactgagagcagcgtctggaaatgacatgctgccgctggcccaggtccaaggcgaagcagattttgcaatccgacatgttcgaactccatcgatgctgcccattcgtcctgtacttcaatcaaagcatctgcaacggtattcttcccgcacagcttgatgcgcaccggtacgctggcgagtgcaggcccgctcaagtcctgtacgccggcaacagatactgcacgacccgcgttgactgctccaaataatgtatcgtcagagccagtgtagacagattgcaggatagcccacgccaaccgaatcttggtgccaacggtgcttgaggaaccactgccagattgaatgctaaaggacctttccagccgctcggttggtctggcagaatgacccacagtgggtagttgaggaaatgccaccatcgtggcctcgtgtgcatcacggaacatagatctccagaaatcattggctttgtcttgagtctgctgtacatggtccactagtggccgaaaggggtggaaagccagttcctcgtctctgtaagcggcgtcggcttggcgcaacagcaatgccatcgaccagtggtcgcagatggaatggtgaatgatcactttcagcttatattcggtgacattgaagaagaaatatgccagtggagcccctgctctccaggaaggactgctgatctcaccgttgatgccgtcgtcggtctcctgcacctgccatggaattgatcctcgcactactgcctgcatacagccgcgctggctagtgggaatcatgcgagtcctcaatatcgggttggcttgggctgttgtaatccaggcctcctgcagcttatggtggtcgatctctcgtggcagatggtattcgtgctcgatggtgtatgctcttggatccttgaaagtgagggctatcattgcttcctggagagcggtgcaggggtatacatcttcaatctcttccagagagcagtgacattgatcggcaacttgtcgccaaatttcatctacctcattctcctcttcagtcgatggggacggaataaaggtgccttttttgaacgagatcaatgtttcctctaatgaatctcccggtggagtgataacacccgtggcaggcatatctgttgatggtctcatactgtgttcgaggtgctgaatacccataatttcaagtctctttgcttcccagtcgattaggaaatatcgctctctttttggggtctatattcacttacctgttccactcaattgtctcttgtgttattccaggttttttccacgcacgatggatactatcggtattgttactttcctatgggaatagggggtttgtaattggcaaccaagaggcgagttcgaatgagaattatagaatatcgacatccacggtacctagtgctacctacacctcagagtaatcacgttatgggctccatacaggcacaggataaacatcatgcgccctgatccaaggaatttcacataaaccatggcatatacgatttgtaaatgtaacatgatagcttccttgacgtacgtagtaaaagaaatcagcatcttttaacaacggcttcttcttttccggcgatgtctaccttgttttcgttctgccaaggacttgacatgtaaaattcatcatcgattgagctgatttcaagatgtctcacaatatgcttccgaaaatggtaatatgaaagaactgcacgaactgcgtgaactgcctaaatgggaattgggttacatccggaactccacgacctaacccacacaccttgacgtccttgacatcaccgctcactccactgattctaccattcggccaatatgagaaatcaaaaggttgtgatgacctagagactttggtgcctggctttttgattgttgcctggaatcgttcgcgtggtatcagagtgcgaagtggttccccctgattcttaccatctgacaaatgactcacgagctcctttacaagtttattcagttccctagttacacacgaaattagaaccccgaagatggtgccaaaagcccctgtttaacaaaggattttctttcatcaaaacgctgtgctgatggggtggaaatgcattctccgtcaacttccccgcagcgtgtcgacacaccaacatcgccagagaatatctccatcagttccgatatggccgcaaattcagcgaattcaaaagaagagacagccaaaccagcaagtctcggtagctatgcggtgggttatgatttattgatggacccggctttgtctgtcgcttacacccacccctctagagaattctatcatatggtacctctaatgggggtatctatattatgattttgggcctggtttgtgctatggcttcaggagtcgtgagttagagcaactgtcgagtactcaatatcaactaatgaaactccaggctcttccattgatgaatattgtctttggccagctggtcggcaaattcaatcagtactttattccaggatcaggtatcacagagcaatcattcaagtcctcggtcaatcaagacaggtagatatctcgccctctattcctcatggcagcaaacttacgctctccttctagcttatatattgtgtatttgtttatcggaaagttctgtttgacttacatatctatggtactatggctttacccctccataaccctattgttactcacacgatatagatttgtttccgattgaccagcctccgcgcctcaggggccttgcgcctggagtatacccaggctctcttttcacttcctatgagcaagctggacgagatgtcagtcggaactgtgacacatgcgattacagcgctgtcaaatacgatccagcaaagtgtttccgatcggctcgccattctgttccagtcattcgccttactcgttgcggcttacgcgatcgcattccgttattcatgggcactgacgcttgttgtcagtgcggccattgtatttgtggtccttgggtttagcctgacaatgccgtttttggtgaaggcacagcagagtgtggacaaagcggatgagaaacatgcagccctcgccgcagaagtattcggctctattcggacagtattcgccctgggtgctgagcaaccactcttcaaaaagtatacactatgggttgaggaagcacggaaacgtggcctacgtatgtctttggtcagtggagtccaccttgctatgctcttctttgccatgtatgtcagcttctccctggccttctggtttgggttgaagctgtatcgcgaagggcatattgctaatattaacaccgtgatcacgtatgatcatcctaacttcgaatctttatgatgccgttttctgacaataaatcagggtattcttttccgtgctcctcgtggtcactattttgggaggcattgcggggccactgatggctatttcgaaagccataagtgcatccggagccttttttggtgttattgactccaagccagataatatagctggcattcgcgatccggagtccaaccatgctgatatcgtgtttcagaacgtgaccttttcctaccccacacgagcagaaatcaccgtgctcaagggattccatgctcgatttgagcgaaataagaccacggctctggtcggaccctccggttcggggaaaagcaccatcgtcgctttgatcgagcgatggtatcaacttcagtttgaggaagaagaggccacgtcgggccatatccatgtgggagctcacaacattaatgacctggatgtgaagtggtggagatcccaaattggacttgttcagcaagagccatttctgttcaatgactcaatatacaacaacgttgcttttggtctgatcggatcgcagtgggagaacgatacagaacccgtgaagatggaactcgtcaccgcagcttgcaagcaagcctttgcagacgaatttatcgaccgccttcccatggtatcgttacacctcttgcactgcatttctttatgacggaaaatctgattattttatttctagggttactcaaccactgttggggaaggtggaattacattgagtggcgggcagcgccaaagaattgccatcgcgcgaagcatcgtcaaccaaccccaaattctcatacttgatgaagcgaccagctcgatcgatattcaaggagaaaagattgtgcaagccgcccttgatcgtgtgtccaaagatcgcactacaatcatgatcgctcatcggttggccaccgtccgccgtgcggacaagatcatcgtcatgaaagatggccagaattttgaagaaggttctcacaaagagttgatactcaaggaagggatataccatagcttggtccatgcgcaacagctagagccattgacagatttgatggataccgacatgccagtttcgatttcttcgcagaaagaagaagtcagagctcaggcttacaccaccaaagaaagcagcgatcaaaattgccaggatactcccgagcctgaaagagcctttggctttttccacagctttggggtgctcatttatgaaaatcgtagccattggatcttctatgcactgacactgatcggggctataggggcaggttgtaagtatttgccttgctcttttgcatatttccaaatatatgcttacagattccaatagcgggattctccctacaaagttggctttttgctagacttgtgcaggttttccagttcactggcgagaagctcgtgcacgctgcgaacttctgggcattgatgtttttcgtcctcgctcttgccatggcgaccttctatttcatgctgggattttcatcgaattcgatctcgatggtgagtcttacaaatacacggacttcaaacaaagctaactgttcagtttgtcgtgtccaatgctcggatggattatttctacaacctattgtccaaacccgtgtcgtactatgaccgcgaggaaaattcctcgggtactctgatatccagactctccactgattcaaaacagttgcaggaaatgtttggtcccactggtgttttccctctcatctcgatctttaacatcgttggatgtgttgcaatctccttcgcctttggatggaagctggcggctgtcaccttttttgccgccatgccatttttatttttctctgccttcatgcgcattcgatatgaaatcaaattcgagagcctaaatgccgaagtttatgccgatagctccaagtttgcaacggaggcggtccgggccttcagaacggtcactgctttgaccatggaagatacaattttgaaaagatattcaaccctgctgaaagatcagcgtcaaaaagccactcggaaggcgtggtacgcaacgttggtatttgcgttttccgacagtgttgagctatgtgccatggctctcgcattttggtacggcggccagctcctcgcgtctcacgaatatgacccagttgcatttttcgtggtctatatcgctattattcaaggcggccaatcggcaggacagtttttcagctttggtccaaacattgctcaggcgaaagcttctgccaatcgcatattggctgcacggctacctacttctgaacagcttcagcatgttccagtggggccgctctcttcttcggactacacccccagaccctctgttgaactaaaaaacgtctctttccaatattcttctcgtgagataccaacctttgttaatttggacctcgccattgagagcggtcaatttgtagcatttgtcggaccttccggctgtggaaagtccacgcttgtctcgctactcgagcgcttctatgactgcactcagggatgcatcttattcggtggccgggacattcgttctattgaactatcctcttacagaaatgctttatcactcgtcgcccaggagcccaaactcttcgaaggaaccatccgcgagaatctccttctcggtctcgaagcccccaataacccgaacaccgaggaccaaatgattcaagcatgcaaggacgccgaaatttacgacttcatcgtatccctgccagatggcttcttgacagaacttggcgtcaacgctcaagcctcgctgagtggtgggcaaaaacagcgtatttgcattgcgcgagcgctgatccgaaaaccgctacttctccttcttgatgaggctacatctagtttggactctcagtctgaaagtcttgtacaaggtgctatggagagattagcaagcaagcgaaacatgactattattgcggtcgcgcacagactagccactattcagaaagccgatgcaatttttgtctttgcagaaggggcgttgggacagggatcgagggttattgagtcgggaacccataatgaattgttgcacagaaagggggcttattggcagatggtatgtttcccgagccacatctacttcttttgactaacgtgattatagtgccaagcgcaagctctagaccgatgaaaggatgaaattttcaagcagtactcattatttctcttctcgtatcccatacttaatatatctccaagactagcgcaaaacacggcattattcttcaagaacctactgagcgagtatctaatctccttcatcaagttccgagtgtacgaaactcggctgcaatgctgtggccctatgtaatatataaatatatatcattccctcctcctcattcacctcctccaaccacttagttagaatatatgattctctctcatgatgattctagtacatacgaccatagggtgtggaaaacagggcttcccgtccgctcagccgtacttaagccacacgccggtgagttagtagttgggtgggtgaccaccagcgaatcctcactgttgtatgtttttgtcttttgttgcttcaaataggaatggaatggcctatatggctgcagtataaacctcaaagctcaagtgtgtatcgtattagcatatactccgtagaacttcgtgcaacaaatatgtaggagggaaggtgatatatatacactgtaaaatataattttagcaaacacatatcaaattgccgaagatatacatctcagccgttgaatctgacttctcaaggagatatctacttcatgtgctgtggtttgcaagtagccaatcagacgagatttgatatttagatcgatatcacgtgaccatatttgtacctggcttatcgataagagtgccaagccatcagcaacccaaaacttttccgctcattcgatatttttaccgcaagccattctgccaatcattcactacaaaatgttgagagaagtgtaagttatggcaatttatctagattgtgatcctagtctaattctctgccctacaggaaagccaagaacccgcgcactgcgcgcatcctgaaatcgcgggagccgcaactcatcgaacctcccaagaagaccctgattttccacggagcgaaatgcccccaaacgctggacaccgtgctgaagaccttccacgctttgacgaagccctacaacgttcttttccacaagaagaacgagaacttgcatccatatgagaactcggaaagcctggaattcttggcgaacaagaacgagtgtggactcgtagcattcggaagtcacaacaaaaagcgacccaactgtgttacattggctcggatctacaactcagagctgctcgatctcgtcgagctattgctgctccccccgagagatggcgaggtcatcccgcccatcaacgaacttgttatggacgtgggtcttggcctgcgacctatgatgctgttctctggtagcccctgggacgatcctacatcgactgcgcacaaaattctcaagagcactcttcttgacatgttcaggggcgaagagacgacccaagtcgatgtcgagggcctgcagtacgtgatgatggttggtgcggaggagccccaagatggcctctcgccggttatccacattcgttggtacagagtcatcactaagcgcagtggtcacaagctgccccgcgttgagttgcaggaggtcggtcccaagttcgacttcaaggtcggtcgcacacgccaggccgctcctgaggtgcagaaggagtctatgaagcagggcaagcgtcccaatgatgaagcccgaactaagaagaacatcatcatggactctatgggtgacaagattggtcgtgttcacctcggcaagcaggatctgtctgacctgcagactcgtaagatgaagggtctcaagcgtcgggctggtatggagtcgtccgacgaggaggaagagccgtccgcggacatgatggaggtggatgtggtttcttctgatgaggaggaggaggagactcacaagaaggcacggaaaaactaagatcgatttgcatgatttctttaaggagtttgggccggacgggatttcgttttctgcgcctgtatgagcagtcttacggcatatgaaaagttattttaaaacctctacatctaatagagatatttcctccaaccattagtttacactagacttaaaattcgctcgtgtgtccgtaatgaagattttatatacatccacgtgaccatgacgtcggctgtattctcacatgccgaggcccttctcaatgcgggaaccgattaaagtgccgtcccctctctcaacatttcccgccgcaggaaaacctctatatctttgctctatttcttcctaatgacccgtgacagtctcctggtctttactcgttgtccatcgccccgataatcaccccgaaacgagtccgaccttttaccgaggcccagagacgccatggatgtattgctcgtgagttccggagcgtatccgactatacacagcagtattgacattctcctccgcagtcccaactgaacgcgctcgttctaaagcccgaactcgcaccgctactgtcattagtgaagggtgcacgcaatggaatcgtctacggatcgaaagttcgctttccgcatgcgctggtgtatgttagaccttggacagccgaaaaccccggtatatggcatagctgactgactgcgactgcttctagaatgatatttctgttcagatctggaacgtacgtccccacgcgcgacctcaccccccagaacgaaactgatagctttgttattcaggatacgtgaaaagacgaagcttgttttgaaagcaacccgcctgcatgcgcgtaacctggccacatttgccctcatatacaaggcatccatgatcgtgctccggaatataccagctggcgccgggaaagaaggccgatatgatagcttcttcgcaggcctgctgggcgggtatgcggtttttggacgacagccgggcagtattagcaagcaggtatgtaatttggacatgcgcctgattgtgggaactattcaaacctcgactcccgaatacactccttctctgcagagctaactcgaatctagattgttatttatgtcttcgcgcgtgtgatgcttgctctcgctaaactctccgtccaaccaaaaatgcaccctctttcctccctcatcacgtccgatgctcgcagtcagatcatgaataatgcttaccccgttttcgccggtatgacctgggcgatggtcatgtacattttccggtggcacccggagacgctggcgtcgagcctgcggagtagcatggtgtatatgtatgtttaccctccactatatatgattagcctcagtttgagtactttgaaagttcgagttattttccaatgctaacattcatgtcaacaacagttacggcgactcagaccattgggattccctccgcactctgcttctacacaacaaatgagctctcagcggggccggctcttttagctttttggtgtgttatggcgtatagaccggatatcattttgttggtgttttttgcaagttgcattcgagataggcatccttcaggccctactcatcatcccctttttatcctgtattatgaggcatggaacttttttttttcacacatttttgacttgaaatataagctttttcagctttactttgtggggattttcgtaattggatagactcaattgactcaaataaatttgcttgaatgcaagattgagcatataaatttgaagcttgacactccttggaacacacatctcacttttgctgggctgtttaatattgtgttgtgatgtgacatagtaggttgaatatattttgaattttcgaaataatcatgggggaagctgggaatatattcctacgaggcagttcctcattaaggaaggtagtgcatactggaagcttggtatttctatggtcatcgtggtggcagttgaaattcaattcaggggaggagcagaaatgtgggaggtaaatggcatcgtgcaatagaagcaagaatagcttcatcatatcccaaaagagacataggagaggaaggtatcagaagaataaacaagatcaacataacaaaccaaaaagtgtgagcatagatggtacatgtgaccgcatacccaaccaccactcctccatcaacaaatgaagatagaccaaaaagagcctcaaaagaaacctcaaaaagacaaaaaaaaggccccaaaggagcacctctacaacctgggtcactcagctgccgacggggtatggatggcggtcacattccggccaatgacttacatgcaaccctgaccatgggaagaagccatgaagtctcagtctcacaattaagttgatcaagttcaaaggtgagggttgaaccacaggcatctgatcatctctgcactgtaactgccccgccaaaacggaacaattacgggcacagtggcttatgcggttcccgcaaggctacctgggcgaggctttggaatatctgccttgatgttaatgtaaagggaacatattgttccaaattaggactagtacgggactagcacggcccggccccactttaaatgtctgctccacctcttcttccatgcaacccgggaacgttaaaggttatgtgcaccgaggatacattaatcgtacatgttcattgggcttttcgaaaattgggggtataatgatacatctcatccaacaggaaaacaacagggatatcagaacagaaaaagaaaagaaaaagaaacgtcacaaaaccgaactactgcccatccccttcaccaacctcaacaagaaccttgagctccccatccatccagtcaacagcatcagtagtgagcaccgcaatggcccagtccttctgattctgcacatgtagcaggccatccggcaaccaaaccttgaccttccacccatccacaatggtagactcgcgagcttcttgcgtagcagcattcacggcctggaattccgtcaaaccggggatttggctcgaataccgacggagaattgcctgcttgaccatgtcgatgttggagcactggcctgcgggcagttcaaatctggggaggatgcgctttccgttttgcaagatattgacgcgaatagaagtttggctgtggccgtgagaggagtccgttgtgttggccggagttgactcgggcagagaggtgaatggttgatggaagtgtgggtcgggtgcttcggttgggaggccgtgtcgggcggcgatgttctcgcggatgatgcgagacacgtcacgggtgatactactcgcgctatgggtttgttagtgggaattgcaaatgtgtttggaaaggttggatcgattacaattcaactcgggctgggaggttgcggcctccgccaatgcgccattggagatctgaggtggtgtccgcgtggacaatgcggttgatgttcgcatcttcgcaaatcgatgggcagtcgtagttcccgttgtggacgacgtggtaatggctgtcaactgcggcgacgagcccgcgccaatcgggttgctggagaccggagagagaccacaggttatcaagctcaaagttctcgttgtacgtattatagcagcgggcgatctcttcccagtcacctgtgtatccgtctaggaggaggtcggtcagactgaggtccataggctgggacgaatccattgcggattgctgcatcggcggtgggggagccattgactgcgacagatcatcgcgatgggatggctgattctgcatttgtagatgctgctgctcgggagaaaattccggactattcgccgacaactcttccgttttacggcgacggcgtgcttcagcaccacctcccttgcgcgtctcaatcgcgtatcggcgttgcctttcgttggtgaccatccgtctgagcaaaggagtgatcaatgagatgatcttgttttggtcacgcggccaagtgtgaattctcgtccccacgccatcattaacggcatcctcgccaaaaaaacgttcaccatatccctcagcatcaaggaactggcgaacacagttccaaaggcgtagcttgaccatttctgaatctccccttcctcgctgaccaacacaatcctgtctttcagggtgttcatcgtccagcatgtaatgtttagcagcagactggagatgtataaagttctccggtgagatcccaagggaggcgtacaactttgagatgggaggccgtgtgtacttcttattgctagagggctggcggaacagcgccgccgcagaatgaatacccaccgcacgagcatccgatagagactgctgctgctcaggccgaatgtctatctcttctccggtatagtcattgggcgcttgctgtgcggaatgcgactgatgctcttctccggtatagtcattgggcgcttgctgcgcgggatgcgactgatgctgcgtgtcagagagaccctcgccagccaaggcggggtcgaggttatcatcatcctgatttcgcttgcgctttttggtcgcggttcgtgtgagccccgaggattggggatgttcggtgtgactaggtgctcgcatgtgtcttccgctgctcatgccagccccgaagttcgcgtcgccgaacccgttcccagagagatccatgtctgtgtatgaatccagctggtgatggtggccagctgcgccggctgcggcggcgactgcggcggcggcagcccattgcgaaacatcttggtctgcggcagctgttgctgcctcgactagtcccgcgagctggttgtcattgggcgcatatccgttgttggtcaattgcgcgttcgggtcgaggtggggggcggttgttgtgtgttggggtggaaggtcggaggaggtagtggggagatgttggttggtagaggagctcatagtgtcgattgagacactcggttcgataagctgataatgtcggaaagcggatattgaggcaaaaagtgcaaggattgaggtaaaaagagcgacaagatacttttgcttgagagggaattcgagggaaaaatcaaagtgagttcgaggtccccgaattacctctagaagggtacgtcttccgagtcgaagctcttatccagctgtagagcgtaataaaaagcttcacccattagaggtactgcttcctagagcacagttgtcccagcgcgccgcacccaagagggcgagaagcgcgtcacagtaaaaaaaaaggtcaaaacaaaagtatggagaagtgatgcgacagcttcgtttggtttggctgataagagacgcgcgacggttgatgtttgtgcagtttgaagaaacaacagacagtgcaaactggaaaaacggcgagggtcacgtgattatgggttccattccaagtgaccctaacaacattttatacagaatccatgacatacctgacttgaatttgagcaccgaatctcatggacacgaatttgaagtgtttaataatcatttctatgcatttgaattttagatatcaccctttgtaagaagcacaaggcaaaaacagaaactctccataagtacacccaaaacaagaaatcagtccaagacaatcaaaaaccgtccgactatagcagaccacatgatcctgtggattagaagtaatgatgttgacagatgataaaacatgttccaagggcaggcctccgtcatgacgagatggtaaatagatggcatatagatcattggcccacataaacttttgcaatcgtagaataaaaagaagaagattcaaagaaagcagcacttgatccagccaagacagctcagaacccatccccctctttccaaggacgaccagcctcctgggcacggtactgggggttctggccacgctccatagcagcagttagaaggccaataatctcctgttgcttctcctgaagttggctgacgaggacattgcccttctcgccgtcagagtcatccgattcatcagcaaatccaatgtcggacaaccacatccaattatccaattcctgctggatctcattcctcttcgcttcggcttctcggtaattattccactcctcgtttccgccaaaacaaaacccatacccgtcacacagacacacattctcctcaacgcagagaacaggctgtccggtgaagataaactgccacagatactcccagattcgaccagcgatataatcactcagatccgtcgacagcagccaatcgcgatagaacacaaaccgggcccgcggaatggagcggatgcgatcgcgggacacggcgaattgcgcacagcacggctgcgccagcacagacggaatctcctggtcggggaatagctccccccacgcacgggccagcatgatctcctcctgcttcgactcgtcttcctcgagagcaccggggtgcatccaggccggacagcccgggccgaacccgcagcgagtattcatgtagccctcgcggatgacacggttcagattgaggcggcggagcagctgcgccgcgtctccggcaaagaggttatcgttgtgccaggcgaattggtgcgagtgcatgaacaccgccacgtctgggagctggtcgtagtggtcgacgatgtaggtgaggtagatcatgacctcgtggcctttgttcttgggcgggtggagtggtgctttggggtcatctgcgacatagatggcgtggtcccaatctggcagttcttcggcaatccagctggtgtcttcccccttggttcgggtcacaaccatcaccttggagtaattgtagcccgagggctttgggatgcccgagatgaagtccgggagaggggcatagaggttcttgcttgtgtggccgcgggtcgtgttccaggctcctgttgtattggatgatgagaccaggtcgcccaggccgatgacctggggtacgtcacgccatggtcgtgagaggcttcgggttgtgaggaagaaggcgaggaaaaagcagacgccgagaaagaagaccgctcgccgtgggagaagcatggacggagggttgacgaagcgtgcacgggattattatctgttgcacgagatgatggttagctgcaatgtcactgtatgccactgtgtcgcgtgcacagggtgagaggatggagatcgcgaggtacggaatgcagaaagcttggaatggagcagatgggaaacaatgccttacatagcttagtgtaacattgccccgagattgtaaggaggtggaggaaaagtgacccgatctagattcaagggactggggtcaccctggccggggaggctgctgggctctgggcaaatcagacgcaagtggagtcgaggtcgtgccgtcatgacgaagcttctttcaatgcgatttatagcatagggaacttcatatagaatagtgagttacagttataagagaagaccattgactaattaatacggtaaatatcagtcataatgaagcaatgtaaatgtcataaaatattattcgtcatattaattcatctaacacgggaagcagcatgacgatctctccaagaattcagctacgcggcttgaatcggctacgccgtggacaccaaaggtagatctacctctctacgctatactctcctaatccaatcttcacttgcatatgcacatcttcatttgaccaaagtaatcattgagagcaaataccatgagattaaaccgtggtataaaaatcgtgaaaagaaatctgggtatgatcttttgctcgcgaacaacgccatgcagaaacgctggtgtaaagaaccggggaatggagagggccgggcagaacccgaagagagaaaaatacacaaggaggagattatcaaaaggagtccgggatcaagcttcttcatcaggagtttcctcaactgatgcggtccggcgcttgccgtgggatgtggactcgggttgagtctcggcttgagcagaagcactacttgcagattcctcattggtaccccatgtagtaggaatagaagctggcctggcgtcaaaggaccctctaggagcaacgtcggtccattcctgagacggggattctgcacgatgttccactgaggggacagtgggtgttggttgcagtaccggtggactaggggccccatttacgggatgggtttcagcattgacggtgccgtgcgcatttatcccgacgctcccgctcgtttgatcctgagcaggaacggggaatggagagacctgagaagttacagcgctagccacggctggagcagccggggatgtcactgtagtggtaggagtaggttgtactgtttgttccacaccgccggcactattatccatacgctggagaggaaggagggtccaaccagggggaagagtgagcccttccggtagacgagggtctccagggtttagaacatcagtgcccgggtttgcgccatactggtggctcgttgtgaataaagaagatgccggggctatgtttggaggcggagccggttggccggcaccaggttgaccggcagctggtcggttaacagcccttgcttgagcaagcaaccgctctagttccccccgaagctggcgcacgtgatttagatgctctgtagcagctcgaagggtggcaatctcttggttcagccggtgctcgatgtgcagcaactgatcattgatttcagcagcgatagatcccccagccgcagcttgtggggcgggggtgggggcttggggacggcgcccgaatccaaatccaaacccgatttgtcctccaggggcattcgcaggggggtttgcccgcggcgcattaccttggtgaagattgttgaataaatctccacgcacagctccaaagccgatgcggaagggtccaaactgatagacccgagcacgtggttgtgcatccgcaccttgttggcctggccgaataccaccattctgacctccgcgtgcgttgttgtctgcaaccccggcagctccctgagttcgctgtggcattataacaggacgtcggcatgtcgggcaattttgttgcctctcaagccagcttcggagacacgaaaagtgcaggatatggccacatgggagcttctttgggcgtagacggtcaggaacacgctgtggtgcaggctctccagccgcatcagcccccggttgcgccggccgaaccggaatcatctcttcacggcagatgatacagacatcttcccgggagatttcctccgctgttgcatccggatacctctgatgcatatcccttgtcgcgtttctgtaacgcatgaagtccataattcgacgcgcaaatgagcggatggtcacaacaacgtcccgcagaatgtggatggggaggccgtagaaagtgagcagaatgccaaagaagctcaaataaatcaggagtttcaacaaatcggtcaaaagatccaagtagaagacccaacgacccttctcctcccacccgggcacgtcgatctccaactcattgacatcgttttcgtcgggcagattgtcaggaggggaggtagctcccgcgcgggcatgttctcgaattgcttcgactcgcgcaacacggatctcatccctacgttcctggatcttggcctttatttgctggcgggttatggatatttcggttaacgcgataacgtatcgcaggagggtggaggtcgagaggattagcaagatggcgaattcgaatccaaacatcaccatcatatccggccgtgcctgcgtgattacagtgtgcacacagtaccgtaacataaagaagttgaacgacaccgtcagcacgagagatagcgccagtcgagtatggaacaaccggggattagccggcggctgttgctctaggaactcaacgcggccttcgccaatccatccccagaccttaccgaccagcagcgaaatgaacatgaccagaaaccagcctccaagttcgcctcggaagatggtcatagccagacatgtctctgtgacggcgaaccaggcccgctcgtatagttgttcggtctcgattggtcgcaagcgtccgtagagaagtcgctggagccagaataagataaagccggtgacgagaaggcataaattcgtgaggatctggagatgtggtaatgggttagggactatggccaagcgcgataacccaaactggacaactcaccataagattcgcactactctgagagagatagacgcatgccgaatagaaattggacctctgatggagagcttttagaaacacaccagcggctaggaccactgaggcctgtgaacgggttccaatgttagcgggttatcttccccatcagctgcagtacttaccccagcataagcggccagtctcatggctatcgactggatcggacaagccgaaggtcgtggaccaaaggaaggataaaaaaggtgggcgtctcaaggtagcatttggcggagaaacgaagtgaatgccgtttacttgggaggagtagtagcttgatctggacagctttccagaataacccgtgggcgcctctccgcatcttacgtcagctaccagcacgtgctgccacccagatctatacatacctttacttaacacatgaatagattcgatttcgctatggtggagtatatatttggtaatcatgtatagtctaatatgttttgttgaattcaaactattagactcactttaaacgtcaggacatgtccgtcgatcttcgatgattatctgatcatatccgtcatgtgacgtcccacattgcccgcccttggaagaagcaaccattgtgacaccgttgtcctcgtcatttgcatcgaacagagagatatcgtcatctctgaatcctataataaatgaattatcgggggtgatggcctcatcaccggcattgttcactgcctcgcgcagccaaacactaacttacctcttggcagtgtgccccttctccatcgccttcctagtttacatcaattcatccatctccttcgtcgtaacagatctgatagggctgcagaatggagtcggagatgctgtcggaactctaggattcgcagacgaacttcttgcgctggttgcctgcccactttggggtgtcctctcggatcgaatcggagtccgccatgtaagcttgctactgacccttgtcaggataattcaatgatattgacgctagataggtatgtacggcaggctatgctattgtagcacttgcgctagtcgtttttgtgcaagctacgaatgtctaccctcagcttctcttgggaaggttgctctttagtatcggtggctcagcggtatcgaccatggtcactgcagttttaccaacagtcactggctcagcctttaatgcccagaaatatcgcgcatctatgtcttcagaattgactatcacaccggagcgtgccaggaatggtcattccgtagatgttgatgctttcagagcatcgccgtctgcgcgactctccgggtttgttggtatgtgtgctggctgtggtgcgctcgtggcactggttgttttcctgccgcttgcagcccgatttgagaagatgggattgtcgccatcgcaggcgatccaacgcagctattatctggttgctgccatatccctgattatctgtctagtatgcttcattggccttcgcgatcttccaggagaacaaggcaaaagttggagtgcactgtggaaaacctctcacgaatcggacgatgacgaagatgatgacgatgacatatatatccatcgcccaagattgtcatactggaagcagttgacaactgccctcacattgggattccgaaaccgtagcattggactgggctacgtcggaggcttcgtggctcgagcctcttctgtggggatatcattgttcattcccctggccgtcaatcactattaccgcgcatcgggcctctgcgacgaggaacgtgaaccggttcctgggtcgggattaggggatatcaagaaagcttgcccacgtgcatacatcgtcgcatccatactgaccggggtgtcccaattggtggcattgattgcagccccagcatttgggtacctgacagacaaatcacgacgatacaatttcccccttcttttcgcagcattagtgggaataatcggctatataatctttgccatgctcccaaaccctctgttcgaaagacccgacggcaatccgggtgtgttcgttgtgatggctctgcttggaatcagccagatcggagcaattgtctgcagcttggctgtgttgagtaacggtatcttgcgggtcagcatcgacaatgaaacattgagaaaaatatacgaggagcgccgtgtccgcggggacgagaatgacactgagccagatgaaggccaggctcttcttcccgggtcggccaaccgcagattggagcatctgtcccacctcaaaggctccatcgcaggagtctattcgctatatggtggagcaggcatcttgcttttaaccaaagtgggtggactgttatttgacatcctgtcagcggggacaccattctatattatggcgggcttcaatggcgtgctgcttgtcataggaatcgtgtgtggggctatcaatcacttcggctcctggcccggaaggacatgatcaatttcgctttcatttgtttttaattttataaaattgtcatggtcgtgcaggatcttgttgaactggctgtgaatataatttcattctcagcagggagaaaacggccccaggttgaattatcggcattgctcggctggcaatagagtacacgtggtttgcagtgtcagcggagaaaaacaaattaaactattgaatgaaaaaacggttcagaagattaattaactcggcatccatggcgttgcgcgttcatgaaattgggcacgggctttttcatcgggcgtaagtacacgctaactagtcagtgacggggaaattacaaaagataatggcgacaagtatataagcattttgaacagtaaacatgtactttgtatactatttacttcaaaggagttgagttttcttatatacaatatcttcctccatacacctgaagtttcccaactcatggtgatctcatcccgctagtctcgcgttaatatgaagagcatcaaacaaccttcccaaagaggcagcctgaaccaggggtcaatccggctactagtcccaaaccagcctagtcccacagtaaactttgcactaaaaacgcctctaattttaaaccgcaaaccttcggaggcacttggacgtctaaggttggatcttctcaaggttgcaaggtcgaatgcggaaatgcccccctttttctaaacatcaccggcctcgggaacccctggggctcgtgttggcgtccgcttggactgcaatgtcggccaatcccgctatgccaaactcgtcgcgacgacactatgttgcatggccaaagtcaattatgcgcctaacccccaatgtctctctctctaacacttcttcctctttcacaccttcagactcaagcagtccgtcattcactctttcgtcgtccgacagtctttcgttaaaatccagtccttcgttttgagcaattgttgatctacttcaagtacatcgtactcgcattctttgtgcacatcttgattatcaccaatttttcagtataaacaccggttcaccaccaatctatttccaacatgcgtttctacaccgtcgctttgttggctggcgctaccgccgctgccgccggtaacaccgcaaccctcctgctgcccggcttcaagggccaggatctcgaggctagcattattgaatccgtgggtaccgattcagttgcgcgatcaacgcgctctttgtccgagcaccttgactgaccatccacagaatggagatgcgactacctacaagatcacctgccctaagaccgttgcggcctgtggtattgccggcgagggcatgaccgcaattgctgccccgacctccatgcagctgcagaacatcgacctccagggaacgtaagtaccggcacggactttcctcgtaagaaacggattctgatatcaaaaaccagccttggaactgtttcctgcaacattgctggcaccacttatgcctcctgccaggcttccgccggcaccgtgaccccgtcgggaactctggcccaagaagatctgaactggatgccagtcactatctccgccaccccgaccccgacgtcgacctccaccccgacccatacccccactagcaccagcactagcactagcacccctacccccaccagcaccagctcggaaattagcaccagcacgaccgaggtgagctccaccttcaccccgacgatcacatcctcgccgaccctggtcatctcgaccaccaagaaaccttcttcggcactcatttcgtctgcccctgtggcctcctccacccctcttgtggtcgcgtccaccagcgctgctgccagcggaagtgctcctgccgcttccgccactgcctacaacgccgccggccagttggtaggcagcatttggactgttggtggtgccttcttggctctggcctgcgctttcgcgtaagctcaacgcggaatatctatacgtttccgtcttgtgcggcttttggttgtgaaagacaagcttcgcgcttgtcgatttattaattccggggtttccgacgttgcttcttacggatgtagtcctgtatactccacctatatgtgtccatctcttattctttaatgttttatacctttctccacgacagactacgatctagcgtctcttttttacacttgtatcttcagctattgaatatacctttcctttggttttcgagacttttctttgttgcctctttcacgccccggacttgtagcccctgtggatataatccactcctgaaagatatccacatacgcctcattgtgtctcatttttgggtatgcattaggggactccaccgaccacggtccctggtaagtacgccaccaggcaataaacaatcacttcattctacgtaggactccagcaaaacggcagacacacaatagtgagttttcacccagtcatattgatataagagaaaaaggtcaaaattaagaacaataaaaatacgaaaaacacaaatcaaactcaaagttcttgccaacgccatgcggcactcgcaatactctcgagggagggaataggaatcactgggtcggtctccggcacctgttgcaaggtaatgatgagtggagagatatcaggtaccgcggtaatcggtccacccggtggccggaagaccacaattgactgacggacctgtgtcacatatcgacgctgacccatgatatatgtaggcggctgctcaagcacaacggtctcaaacgtgacctcaggcacagtccgactgaccgctatagtgattaccacatgcacttgcccctcagagttcgccagccaccagtccgcatccgctcgcagtttctttttagcctcagagactccgacttccagaataactgtgggccacttttcgcttcgacccggaggaagttctcggggaatccatgatccatctggttctttggcgcaaatgcctccttctacccgtgcagttgtgagcgaccattccgttcttcgcatattcgcaagagagacagccattactagatggagctcacccacgagggcatcgtggggtcggcccggtatggtaacgatcaggctccgggtgtgtcggtcgtaaagctggcggtattcattggagagaatcagctctgctatgtctggtggcacattggtgaactttgcatattccgtgaccagatccggggcactctggagacgggccagaattgacaggatggcgtaggctgaggatccgatcgtttccaccgcacattccacatcgaaacaggcaaggtcaagatcagttaggtccataatcctttcggcaacaggcgaagagaaactgatgtgtggttccgaggaaaagaccagttctgtctcatcgaagcttcttggtgatcagtcaccgagtcattcttacctcaccgacttcttgtttctgagctgcatctttactcggtaggtttgaatagctcttccataaatggtggaaatgccctctcctgcgattcaaatggtctagtgaagccttcaagggtagaaagttaaccgtgaagctccgcgagctctttgatcactcggataatttctcgtgggcaaggcttccttggtgaataatattttcaatttctatcataagagaaatgtcagagaccagaggtttcattattcatagaaaatatatgctcaccttctggtggatattcgactggcggaccccgaactttgcggtatttagaatctggcacgattgcgatctttccgaaattaggtcacgtccaaaagcccgatgagacagaactgaccatgttgtcttcaaggtctgtatataattgatctgctgccttcttgatctcccgcagatggttttttaaacgggacgtttgcgacgagactagtaagggcaggcggtatttcccgaggatcttcttccagcagtaccatttaacagacgttgatgagattgtatagttgttatctgccagccagcatatcaactccatatgggcctgggctagaaacagggcacggttggagcatcgaaaattttgccttgcagcgtcgatgagttcgccgtcaagcgcggcgcgatcagcgtaatcccaaaggtattttcggaaggcccttctgtccagtctattggcttcaaggttgtttgcgatcgtactgacaggggttgcaatactgtccagtaatccaactgcggtggtgattgcttcttgatacatggtgaatgttagattcaaaactattgaaagatatttcacattcaggtgcagtggcgtctttttataacacaacatgtacttcgaatgagacaaatatctaggacatgtattgtgatcctcacctcagcgcgcggcggcgaagtgtaccaaaacctgtttttctcaaactattccatggattgatcattattagacaggaagaacttgagctagaaacccttccacaacactagtcagaaaatatgaacgactagagaggttgcaaagttggatgagatatcccgcttccaacaaatcatcattattcccttgccactctcttctttgtcacatctagacccataagacggatctgtagcagaagatccagtgagaagaacctcatttagtaggtcatgttacggcatctcgtatttcatgttcatttaagtggacgccacaagtaataaagttttagccgcaagctcagctcggcatttcctgcatagacagacaggtacagatatcagttagaagtcccgatcagaaatattggattgcgaaatttgggttcgaccagacagaatgctgatgtcggtattgttgtggtaggatataatatccggtttgtagctgatacagagttgtaggggatgagggtcatggcactgctagatatgttccggggttcaactttgtttgtatagaccgcgacgtcataaacacttatactcgccacatcatgcgttgacacccaaacaagagaatgtgctgccgtaaataattaaatattctaaataatggactgacaatagagagaggcgaaaacaagaacccagcagggagcgaaggcgaccaaacaaggaaagctcccaaagccagccaaatcagacgccggacataccccaacgaggcgcgttcacgataattccggtcaaacaaccggcgatgataccggcgcagggaagcgtgatgatccaacccatgtagatccaggcaaccatccgccagttgatcgttcgccaagtgccgttgcaaagcccaacaccgacggtagcgcccgtaatacactgggtggtagagacggggagctctgcaagtgtcatgttagcgtggtgatgatttgggaatagataaaagggacatactcagcctggtggcaataatgacagcaatggcagcaccgagctccatagcgaacccacgagagggagagtgcagggtaagacggttacccaagttgcgcatgatgtgataaccgtatgtccagataccaatggagatagcggcaccaccaaatacactggagaatgtgagttaacacgggcgtccttacattgatggaataaaacttacaggatccagatggggacttcggtcttagcgccttcaagggcaccagttctccatatagcatagatggttgcatagggaccgacagcactgggaacagttagtatatgagttgatagtaggtatgaaatgggaaaaccaactttgcgacatcgttcgcaccgtgggtgaaagaagcggtacaggctgtcagaatctggaggaaagagaacatgtactccgcttcgttatcatagtgatcagcatgggcatgggtcttctcgagatcgccagcgagtttgctatcgctcttctgggcgctaacaatgtcttgctcgacaccgtttaggagggccttcttcagcagccagaacaggacaggaccactataccatgctccttcgggacgaggaccacaaatgttaatgacatcgggatccacggcttgcgtcccgttatccgagttggcagtgacctggggctctgccttgagatcgggggaaccaggctcgctgttgctgttgtggctcttttccacatcagtggaacgctcagcttccagttcctctagggtcttgtggccgcgatagtagttacggacggtctcaacacggtcgggaggtgcaggaacttcaccacggcggaagagaagagggccgtagattaggtcccaaggcttgagctgccagtcacccataatcaccctgcggtagatccaggggcaaaggaagagggccgagataagagccatgccaacaccaacaccaataacagttccggctatctcacgcccctcgaggttaatcctgctactgccacccttccagacaatgagcactgtgttttatcagtagccgatacacagagatcagaaatttgacgaaacatactagtaaggaggccagtcgtcagaaggaagtagaatggaatggtgtataacgccctgagtgcgggattcttccgcagtaggataccatacttggtgatcaaaaagataagcgcaccggcaacaccagataagatgggtgcaatcacccaggcaaggaacacctggacaacaccggagttgatatcacctccccaccagataatatcatcagcaccgataagcgcgatacccatcccaaggataccaccgagaatggagtgggttgtcgaaacaggaagaccgatcttagtacagaaggtaagatatagagaggaggcaactacagcgcagcacattccaagcatgaggaggggggcgttgtcggcgaaggcatcgatcttgacgatcttggtacggatagtatcagaaacactgtttcctacaccgacactggaaatataggtgagtacaaagtcaggaagtgggaagcaggtcatgaacttacgctccggcaaactccatgatagatgcgaggatcatggcttgccagtgctttagcgaacgcgacgaaacagacgtcgaccaggagttggcgcaatcattggcgccgatgttccatgcatcgaggaacgcgaatatcgtgccaatggcgaagatgtaatcatactgctgaagaaccatcttgacggttggcagaaagcaacagcttgtcctttctgaagggttctagaaggactctgggggctgacgagataaaaaggaaattagcaggatgatccggattggatctttatatgtgcaagttccaatccaggccaggagatggcagcccttgcgctgtagatgcagtggtgcaaccatccaggatgccaagctgcccaggcccgccgcgccgccaagaaactcctccagtgtccgtgcacttgccaagacgggcctccgccgacgaatcctgccatgacatacgagaacgtgtccaccgatgtggaaagcttcagactacctgccatgacctcgctaaacgtcgggctaattcctctggatggttcagaaacacgaggtgctctttgcgaatgtccttcttccgactggcaccataatctgccttggcccttggcaggacagagcccacgccatgtaggcaccttacataagcctcgcatcgtgatattaaccacatcgtgcttaaatccaacgttcttattggccggctgattaaattattgacattgagctctgaatctaatcctgacatctggcgcacacctggacatcgacctcggttgtcgcgtggccaccgtgacccagctctctcagttcctcgacctgtcgctggaggtattggatgtactccaccgccgtctcaagcagttctgcctggccaagcaagttcgagtgagcacattggtctgtcatgtcaggagattggctgtgtcagttgcctccataccttggtacctttcgttcccgcgcctcccatcctcattatccgctctatttgacccagagctactttcatccgatcccgttgagacttttgtgcgtcagcgtgctgtctccttcgagtctccgttgcatttggacctgtcatgatgaggagcgagcctgctccaatgaatttctgttagcccatccatctcccctggggatagtgttgacgtcacacgcgaattcaaaatgccaattacctttcggccggatctcgaccaactgtccctttcggtttaggagataaggcaatctcatttgttccgcgtctgctccagtgggctgcgcagttgcatgcacgtgcgccattgttaatatataggttcagcaccgaatttgccttcttgatagcttgatggcttttcaacagcttcaggctatcgggctacccgagtggctatatatattggccacgcaaatgactcgggctcggactttagcctatgcatgaatccatgccgtgcgtcacatagatagcaacgtcctactattaatatccttgattaaagaatgcacgcacagactccaatattaattctcccgaggatgcaacaaacagtattccactcgaggaaggaatatcttattggccatgttgtggcgctaaagggctctagaagaaactaaattaaccttgaaagtcccctcccttttcaccttgcccagttgggtgctctaagatgagtcgtcttcccaattccagtgtcattgcgaccttccgttatcgctgagcaccttgaatttcacgttgatcgactcgcttccttcttatagcaatgttgccatatccttatacatccgcaatgtcgaagttgcgaatgaagtcatagtagaacttaacggcgctcaagtggtcaaagatactcacatgctcatcgacagtgtgaatattgtccagtccccggctgatcgatggggtccacctaaacacattgcgggaaaggcctgatgataccgtcagtttgtatgatatgtggctacccagagtgaaacttactgagataatgcctagtatcggtattaccagtcatgacgtctccgactggaacgatagtcttatcttctgttgcaaagacgtgtcgaattgtacccgagaaaacatcccaaacaggaccactaacaggagacaccggtgcagcttcggcttttgtggctctgatgacaagagtgccattgtagtcaacttcatcacggcgctttagatcactgtgatgtagcatatcactgggagaaagctctgcaacataatcctgatattctttgtcgcctttgaatgcatccacctggagaccatacttctcaactacatccgcaatcacttgaacagccttgtgttgaacctgtaccggcttttcatggtgtgcaacgcgatagttgacagccagggtaacgacctccggcatggcattgattttcaccccgcctttgattagatcgatagcctgtgaggtttgaacaacgaaccggttcaacgggctagtgctggcgaattgaacagcaagtccatcaaagtcattgtttcgcagtagctcttcgatcttgggctgggtgttgggagaatatcgcgcttgacagatcagacgtttgtgaatggggctgtccttgatgatttgaggctggtacggattagcctcgagcgcaacaacaatctcagaaataattccgattcccgtatgcggtaaggggaccgaactatggccccccttggcatgaagctcgaagaagagattggaatggcccttttcagtgattgcagggtggacatatatggtattgtcatcaagaggtgtcgagcctaaaccgccctcgtcaaggataatagcaaaactgtcgtcaccatatctctccttgagtacctcactgatccgtgcagcaccttggttgagaccaacttcctcatcaaatccgaatgccaaaatgagagttcgtctaggtttccaatcagactcggacaaaagaccttctagggccgagaagatggctgtgagactgttcttatcatcggatgaaccccgaccccagatatattcgccatcaaaatgggcttcaaaaggtggataagtccatgtggatgcatcagccacgggaactacatcctgatgggcggtaaggagggttggcttcagagttggatccgagccttcaaatgtgtaaagcagcccgaaagtattgattttctctagctttccacgcttatgacttgaagtgatcagctgtgaggacagtttccatgatggacttctagcttacactgtgggatacgacttttgaagaacagggaaaagcttgtgaaacggaagccatcgctcatcctcgccgatttcgcctagatcgtcgtaggaaaccgacggaacctgcacaatggcctgatgacgttgtacctgtcttttcaacgcctcatctgacgagaacaagctcactgccgacggcaacccatcattggccggatcaagaatagggggtagatcgcatatgaaatcagaacccggattcccagctgtcatagaggtctggccaataaagggcagcacgaaagccgaagcaccagtaagggcatttgccaggaccatcaagcggaggcaccccatgtttttacgtgaatttccgggatcagcccactttcacgatgtcaattgatagatagataatgaaaaagaagagcgaaatcacaagactttgactaaaaggggccttttaaagaggggaaacgctgcgaagtaaaatgagcaacttttacaatgtactcgatgatgacatatcaccaacagcttacgacatgcatggatttcatgctaagccggtttcgatgtcgaggcagctttctcctctctcgaagtcgatatgaagcagctaatatcctctagccatggcgttatcatatcatatatggtctcaactattttccgctttaacatccttggcgcttttctctcgttgacaccgaatattatatttttgtgtatttaaagaagataccttgtcttatgaatagagtgggtaaagtttggaacattagcaactcataaatcctatatcattatgatgaaggatgaagcctaagataaagtgcggagtgaagtaggtacctttgatcagctcttgcgaggccgaactcggcttcccctcattgcaactttgaccccattcttatgccatatccaccatctacaatcagaacgacagtgataggtaaagcctgatagatagagatggccaagaagagccaagcataaaactctccaaacttagattgaaaggatctgctatcttccgccctacctgtccatttgtcattgtgaaatcccccagccctgtctagcagtcaaaatattggctgtatttgtccctaggttacaaaatgctcgtaaattatcgcgaacggcttataaatgtccgttatggcacatctttcctgttcgggtaaacccccggaaaaggtggatgcgcttcacctagctagaagaccatcttatgtacagagcggatggtttcctatctacgaccctctctaatgttgttctaatctgggccaagcattgcacaatttctattcattaccgaagccttggaaatacccggacgagtaagacttaagtaggaaacgattgacctcagcagctgcatcctttcagagaccaattctcaagccaacatgacaggaaaagaagcaaaggagctccctactgagactgttcagcccatagagatcaaaaatctcgcctcaattaataaagaggaagttgactctttcgacgagtcgcaatatgactttgattccgctgaattcaagaacatacccgagctagtgcggacggtcgttggtttcgaggacgacccagaacttccagtcttgaccttccgctcgattcttctatcagcactattttgcgcaatcggcagtattgtttctcaattatcttagtgagtttcgttggcacagattggcagcaaacggttcagcttacaacctactagctttcgaacgacatacgctccgtttccagtattctttgtcattctagcgtctgaccccctcggtcggttcatggcacgtgtactacctgcctatagggtgccgttgggaagattttcgttctctttaaacccgggcccttggtcgaacaaggagcacgcaattgttggcattgccgccaatgctggaagccagggtcaatgggctagtaagggatccaatctatcttgatatgccagaattactgatctcaaaagcctttctgcctacaaatgctgccttgtactataatatcactatgaacccagcagttgccttattctttggatgggtaggctcattcctcgacggactaaagtaacacgctaatttcagacagggttgttccttgcttggttttgcatttgctgcaatgggtaagtacttttggtatctgttactgaataaaaattgacctgtctagttcgcggagtcttgatcgatgatcccgaattcatatttcctctgtccttgcaacaagtgactctataccgaagcatggatgccaaaaacagacctgaccagaaaagagcgcgggagcaggttaaggtatgtatcctctcagtcatgattacaatcctttgaaacagctaattgaatattgtcaggtattttggatattactcctcgctacatttgtttggcaattcctaccggaatacctctttccctttgtggcatctctggctcccctctgctggtttgctagtcgcaaccacactgtcaacttcatcggagctgggcgcggtggcatgggattgctaaacataacccttgattggtccaacatcacttcggtggttatcacgtatccctacagtgtacaagtgattatcttcttggcgtttgtcttgacagtaagttaaaaggtctgtgtcaaaaggttgtcctctgatctgttccagtgttggattctgattcctattgcgtatttcgggaacctttgggggtcaccgacttttaacatcatgtccaatggggtattcatgaagaatgggacaacctatccgttcaatgatctaagtgggtatcttgctatgacatttcgggaatatgctgattattttcaagtctacctcgattccaacggcatgcaacactttaacgagacgaaatacgatgaagtaggccttgcctactctggagctcagtatacgtggcagatgttcatggtaagaattccgcattgttacaccccttcttttactgacattatcgcagtgggtagcctcgtatatgtcgtcttttgcttggtgcggtctgtttctaggcccaaagatataccgaatgtggaaggccagaaagcaggcaggatcttatcaccaggatagattaaggtatttacgcctggtgcctatcccatataggaatcctgttattgaccatttttagtcgcatcatccaacggtatcccggtatgacgaagtggtaagatcctctcgtccttctttacgattataactaaaaaggatggcagggaatgggctgcgcttactctgataccattcctaatgcttctgggtgttgttgtttccaagacagtctacatgcctatctggacgtactttgtggcattgggtttcggtgcagtatcgatgttaccgatgagcttcgtatatgcgatgtcgggcttctccataaaggttggatacttcaacgagcttgtttatggatgtaagttgatgtgagcttatgtcccattcctattccaactgactggactacttctacagatatgatcgatgcgaagggctcatcacggcacccattgggccaacttgcttatcgaattatctctggaaatgtgtggtacgatgctcgtactgttctagaagatcaaaaggtttgattatcgacaatgtcattcatgtgatagaagactgattattaattccagattgggcattaccttcacctacctccacgccaagtcattggaatccagattattgccaacatgctcgcactgccagtaaactatggcgttatgcgctgggtcatcgccaccaaattcgactatgtcagcggcaaggagaaagaccccctcggccagtggaccggtcaagatttccaatcgtacaacacagccggcatccagtatgctctcgttgggcctcgtaagctcttcgcttcggccttcttcagacccatcctctggggctttcttgcaggcgcacttgctcccggtgtgatgtggttattgcacaagaaattccctcgcgctcgtttcgatctgtggaatacgactatattctttgcatcagcagcagttttctatggtaatctcagtaccgggccttttacaacctttctcgtcggcacttttaccaacttctttctctatcgttataggagggttttctggaataagtgggcttatatcagtggtgcggcattggacactgggtttaacgcgaatctattgtttatctttatcttcttcgggacaaccgggaccaagatggttcattggtggggtaacaacgctgatagtatcgagagatgctttgccttgaagggatagggagtattatggtgacttatatagaacgaagcaattaggcagctcactacttgaaagcttgctccctgaacaagccccctgagcctgtggatgctgagctgcatccatcagattatgtcctgagatcacctgatctgtcaaaatatgaagctattcagagatcgagcagcatgaagtgattcaaattaactcaaccaccactaatagagataattcaattctggacatgtcatttaatgctaggtagcagagaatatctgattaattaaatgcgaccgatgtttaatactaactatggttcaattgtatgaagttggagtgaaatctacagattagcgacataccgcacaaacctacgatttaattttgatcctaccaattgagaaaacttctcttaacagatcagctgatctctaaatagcttcatcttgacagataaggtggtctctgaatagcatcatggtggtagttcattattcatggtctctgaatagtggcagatcgggtgactcggtgagggattgggtaatatggggctgaatataaaacagatcataaagtggcgataccgtaataaatgacactcgtattgaaaatggtgtgccgagagcgaccttcctaattaggttagacaactgtggtagtagtgattttcgactacggagtacaacatacaatgttgtatgcccacaatctgcaggacccttctcatcaactatatgcattatatatttctctcaagttgtatgtcgagtacatacgaccatagggtgtggaaaacagggcttcccgtccgctcagccgtacttaagccacacgccggtgagttagtagttgggtgggtgaccaccagcgaatcctcactgttgtatgtttttgttgttattatatataggatggggcgatgttatgatattgtgaatgtttaaagtatttcaaagtgctagttttaagtacggaatactagtttagaaaatccataagcttccgtaaccagataaaatctccatcactaataatcagatttccaggacctgacatagttaatcctttaagcctgataaatttaaatactagtaactacttgctgagggtttatatggcagaattgggtataaaaaggcggtaacttactggtagcctagaataaagaaatccacttagtatagatgagccccgcgttagccgcgaaattggataatcgaagaattagaaaaaaattccactttcttcctcctacttattatatgactttcattaatatgatattacaatttttggtagggctaagatttcacaatatgttctaggctataaaggtgtgatacggagactctgggccgggtgggctttgccgatgtctacttacacctccctaggccaacgtaggagttggcttaaaccgacatgctaccagatatgatacggagaggatcgcatggtttctaataggttaggtgagccgactaaccttggaagtacgatctagtacaggagttaggagtacccaagtgtgcagaatggtccgtacgggaccgcatgggcacgtaatggtcacatgacgaggcacatgctcgcacatgatcacatgacactgcgtagttaactaggtaagcgtcaagtaagaatcctaggtcgaatcttcgagaatagattttactcctattttttattttagtttctttaagctaataggaatgatactcacagggaattttgcgaaggtatagttcttattaccaatcgaagcctagtagaatgccaatattaagcttgttatcgatctacagtctatagattattctatacagtatattgtacaagctcacttttttcaacagaagaatttcgaaaagtatatagcagaaaagagcaaatagttcgaaaagctatctactataccaatcaatgtccaccttataacgataaagataagctctataagagtgagtattacgctcatttgataagtgtgatcagtttgattggtatgtgctatttgtactaggatatatgtataagtataggtaaatcagaagggctatagcgagtctacagggcgacaaagccacaataacgaattgaaccgaagatacatcatgtcttctagggctatatatagatgccaagtatcgaaatgtttccgtttcaacttgtaatcgtgtcactttagaaggtcagcgcgggcgtcacactacctagggtgattctcaccctgtcctatagcgcactcacccttctcacccctggtcgtgcgaccgtaaagcggcgctcacccaattctcacccagtctattattattgcactcggtcttatccaaaatcaaattctcttgttctattaatcccaaagtcagggttgtgttcgctcgcttcctatcgagcggcgttcttaggccactcttagcagcagcaagtgctctcctgacggtagagattgttacctgtgcgccaactcacgaaacaggagacccgtcatctcatcggggtagagactaggcttttccggcaaacgatcgcagagaacctccaacatcagtgaggtagtactacgcggtatactgctcgaataggagagagctctggtattaccgaatcgccgcaggttgctgcggatagtgttggcagaacgcgggctacatccggcggcctcagcggtctcagatgttgtcagtgatcaagatcatatcgcaaatgaattctcgagtgggaaggggtgaatttggcgccattctccctcgtggttgttcatctgctggtcgggctaaggtggtgtaagttactgcaactcagaagcagtagcccgattaggccggttgtcgtgatggtcccaaaagccctcgtattcggcactttagtctctagtaatgtagatagcttctttcttccttatgcaactcgagatttcctggaatactctattgcttcatagtagtcctctcggccttactcctctcatccgtttttggaaccttcagtccgcttactgacattactttggccatctttcataacttatcatccactaagtttagtccatattcccgaaagtaaaaccacatgcaatgtcttgggccacacattcaaaatgttaactagccctaaagaaccccccaccaccacctcatgttaaactacagtttgatcgtaaccatcctattctcgggtacaaacaaggattatgccagctttgggccactacaaggggttggtaaagtgcatcaaacgaatcagagaacacattgaaattagaagataaaagtgtatcccaggttctacagcatgaacacaaccaatatggaggctccccagtccctaaatctaccatgcactacagctaacgtgcagatgaatgacttggacccaaccggcttccaacgaatcacccttcatactcttcaccgatttatctaataatgtcgaccctctacacaccatcagagatggctttacaggagaaaaaagctgatcagtggtcaaccgggtgcaccgacatttcgccctcgtacgtgttaagtgtgcgatgaagtagcaataaaaccgagcacctgggccctgggcacaattctggtaaacaatagcgaacataaatacttcgatggctcctggcattccatgctttttttctgaaggctagttttgctcttcattaagtctcatcattactttgaaaaggctctgcaccagcatgttcaagctggccctatcccccgagcagccaaaagccatggctattcaaacccacatcgacggatctttgtcttctgtcttcatgaaacaatacaagcagaacgagtatgcgattctggcgagagccgtggccgatatgtgccaacaagcccttttaaaaaatggcataccccataagacccagagccgcgcgaaggagccggaaagcctccgaaaaaaaattgagcagcgtgagcgcaagaatggacgatacaaaagtctggaggatgttcatcacgatatcgtggatctcgccggggctcgcatcattcttgaaagatgggaagatcgccattttgtcaaggagataataaacgagacgttcaaagttcagaaagaggagttcaagaacgaaaagagtggctatgaagcagtacattatcgtgtccactctaagcaaaatggatggcagtgcggtccccatacaacggaggagccccttgttgaaatccaagtccagtcttggtacatggcgcaatgggccaatgttgagcacgatgctcagtataagacatctaagggtatgagtcgagagatgagcaacagccttggtgtttggctccaggtgtctaaactgaccgaattccttgccgaacaaaccaaagcattcaagaccaagcaagatgcgaaggacaaacgaaagttcaggagtaggaagcacatcggcaactatttggacaagtggttctcggatgatgatgggaatgccgccgactgggcaaggaatcagaaagagatgggatcttccaccgctttagaaatatatttggatgctcgtggatggaagactcctgagtctctaaatcgattgctctgcgagcactttggggccgaggcacaggatgaatactcagacgttgcagcaaaatatgcgggaatcgacttgaaccgtgtaatctatctaatggaccggatagtcctgaactgcggagaaaattgttctggggcctttgaaatccccaacaatcacgaggtacatgcctacaagatccaggtgattttgagtacgttcatctggatgaatcgtctctttctgccaacctatgggtggcagcgtttattcacgcgcattgaggaccaaaagaccgtgcgcgagggtattctcttgcttggaatgagcgcccggcagaattttgcggaagaaagctccttagccgatgatgaggtcatcaagctgaacaggttgtgggattggttttatgcaagtcgtgatcgaccgatcatgttggctttcacaatgtcgaaccagggggctattagagatgttcccaaagagaagaccgatctgcgaaatgcccttcggccactgattgcggccttgggtcggggtggggcttgagccttggcgttgacggccagtgagtagcagagccaaaaggtggagattaaagtgcgatgtctgcaaccgccgaaggttgtgtttttcctgttgtcttgtggcttatattcgtttcagttgacaagatatgtccatcgacagtcaaaatgctgcttataaatctctgcaacgattctgttgattgtttttttagcaaatggtggaaattaaaatagccaccagctctcggaaggtttgttgagattggtccctgcagttcctcacatcccatcacacaataaccatgtgacctgtcgatttcgagggcgcagtaacttcacgtgctagtaaacacagccgataggtgtccagaaaaaaagaaacccaaatgaataaaagatgagctgaagtagagttatcgctatgctgtaggatgtcaattgcgtgcaagtgtaaaaggtgctgatcttgaccacatcaatatagccaaagcccaacagaatcatgtttcaggctaaaacaaaacaggaggcaaacaatgatatgaaattggtaatgccgagatacacctgtaagtgaacatgatacaagcgtattatgatgaaaaataccgacgcgtatatttggccaggcaacctattctgcaaagtagtaatttcgcacatcaaatgaaaagtcgtcttttactgttctctgacagtaaaacttcttgaaattcccacaaaggttcgaatttttggactagcagtgccgtggatgcagttgtgacgagtggccatgtgtttctcgagttgggtgagcttggtgaagcaggcacgaggccgcagaaggtcacacgagaagactgcaagagcaatgcagggcaattcagctatgacgaggcctcgggactcaagcccagtcagaggagctgacacgactcaagcagaaggtttgattaatcaccacggtgagatgattattggagacttgctgacctgtcattggcatagggctcaatgaaattattgaacacctccgatttgaggctcttctgaacggttcccctccgcatgatatctccgaaggtcaaatcaaaagaatgaaggcaatactttcactggtggagaataatggttatcttggttcatcaacagccaaccgagcccttgacttttggatctggtgtgggcggatgcctgggcggtgggctttggttccagatcaaaacctctgggaagaatttttagaggaggacctgttatataagtctaaaggtcagtgcaatttcagagcaaagcaaggagagcaggggaggtacagagttaaaattatttttcattttcggttcaccaacattcttctatccaattagtttttgggatagggatctaaccttttacctgagactgatggagctaaccttgcctagatggctcaaatgcacgaacgcaggaattgtccgggttgtccacgtggatatctcccaattttggtgtcagcagaagacttgaatagctactcaaatgccacgccaagctcaatggtgagtatcagttgaaagtcattggtataccggaaaagttactgacatagtctaatgatcctaaggacaactcccgaaagagaagtcttgcagactccttgtatggaatacaatccaagaatgatggcaaagtggaatacaggtcggccaggaacatggtgggtgggagggacatatgaatggtagcatcgaaaagaggggtcacatagcaccccttgctgtctcatgcaggaaagcacgcagggcttgagaaacctcggcccattggatattcgcgtagaaagccaagtgcaagcgctttgtccgccgaaattgttacaagatgtgtgcccgtgtgccctatgatcctcccccctctcccccaaactatattagagtttggcttagtttgtaattaattcgctccatatttattttttgtcttcgtcaagcctctctacgtccctttgttccttttttttttgaagcctaacctacagaactctacgttcggctttaggtcgagtgttctagagacacagaagaaagcaagaagcaaagaaaaaccgatgatacgctatatgagtctcaaaacagatggaaaaagagaaaacgaaaaaacggttctatctaccctgatcccgtcgcgtgctcactcgacatgggctttgacgcagccttagtaggagcgcaaagagtttccgatagcgttgagtatgtatattcttagtataaggaaggctcaaccacttttgcttattggtggtcattcggtgtccaccacgttgatcctccagctcctgatcaccttttactctttggatgaatcacaattaggctgtccaataagcatttctcttcaattaccccaactcgtgaaaagtaattaagtagacgccagagtacagttcctgtttactttctacaccataagacttctagggctctttaaaaccttgatccaactatacagtagctgtatctcccccgtaaagtataatgatccagtgtacgggctgtgagaacgaatatgatagaaaatcgaaccctcagggtgaggttggcgcgtagcatatgcttcggcgaatgaagctgttaaattctaggaataagattatattactgccccaatagctgcggatactaaaccgaggcgtaataaatatagtaaggtagacgtaggtgatataacacgtgagtatctcttgtgccgtggctgacaggccatctggataaggtatcagtttgtttatttttgtgaatccccgccgaaataagcaaatagtagaagatcgattctcgggtttactgagtcgtgcctttcctccacatcccttgaagcagctgcaatacaagcttaataggaccagcggctcatttgctatgggtgttggagaaatattatgttctatagggtggccccaaccaaagtagaacatggaagagcaaattgaccaccactaggaccatttgggacaggcttattcatcgttcacccaattccccctagtatttgtacggtattccgggcacgttcggaagtacggtgttgcaacacgccgaagcttatttgtatagacccctgagatcattcgaccgatctttaacacctacaatcaatcacctgattctattggacatgttcagtactagccagtacatcaattcctcatcctgacagtatataaaaatcacactctcaagtactcaattggctatgcccatactagtccgtactgtaacgaccacgtttcgacaatagagttatgtgggtcacgacccggtaatatagatacaggtctaacctagatacaggtctaaccctaatgcatgagtagtgcgtatcagggtgacaggacaatcccatcagtacaggggatccaacaccccattgagctatttcaacactaggctgaatgaggatagggttcagggggtcatgggtgactcatatcatcccccaatgcttgtcaaaccccgaaacaactcaggccaacatctgactatctgttattattgccaagatgctggacagactcccactagaaattttgcacatggttatgcaccatgtgagatcttggaacccttcgcaaggtctgacacatctgacagttaataggtgccaagcatcaaggacctcgtgcttttgtctgaggtatctaaaaagctgcatcggatcgttttgcccattatctacgccaaagtgtacatcccagtacccgagcatcacttagaccaggtgacgattagtcccatgaagacctgtttcaagggagacggatccagagataccttcaatagtcttgaattcttgaaaaatgtgcaactggtcgctccattcaatgacctcagaaggaacaggtgctaccggggcgaagtaccactcctaccagtcgaatatgatgactatctcggcgacgaggaagagtttgacatgtgggaagaggagaaaaacagacgacgtcctcatgacgtgatgatgactaatcttgccaaagcactgaaagaacttctctctcatatccccaaaaatactttgagaggcttttcgtatgctctttttcaccactcatttaacacaagaactgtcgtgctaacaatccatagttggaatctgggatgctgcgttcctgaccaagtatttggtgaagaaggttttctgaatttcgaccagaatgcaatccaagatctgtcactgattacggacgggacatgtccaagtccggaatgggagcatctcgagggtctctctgacctccggcacctgcggcgcttgtcgtggaaaggtctaaaccccaaccgtagccaaatacttcttcgtcacaccctgatggcgaattgtgcacaccttgaatgtctagaactagagccgattgggtgtggagaagtttacgtgcacgttgaagaaatcattggcgacacggatgtactaagggatgtattccatttcaataatctccgacatctgtctttgaccaaggttgcgctcgctgcaccgtgtgcacgaatggcaactacattttgcatagagcaattgcaatcattgaaattgcgtgattgtcaccaaacactggaatttcttgagggacttacggagtcatctcacatcatcaaactacggtcatttgaggttgccatcgacgaggaagcgtatcttcaaacttattacgaaagcaacaagccacatccgatcgaatcgttcctgctgtcttttcagggtcttgaagaactgtcgatttcaatttcgaacacgttccacccggtaaatcctatcactgaccctatctgccaccatcgagacacactaagacggttggtatatcacgaggaggggaacgagattcacagggaaagtgaaggcccgcttgcatggaaactcttcaccaaccgcatagttgagggaatgaatttggagtgcattggattctgcttatctccttctcttctggtacggctggctttcccaggtcacattatattgtttgtctattcttacacagccttcttttcagataccgaggcttggaagaagcatcgcggctcaaacagttaagctcttgcattttagggaacctggatctggatgtgtgccacacaccaacgctctgtttgagtttgcgaactgggcatttggtccacaaggacttgataatctcttgatcattgcacatggtgatttttcgcatggtaatcggtttgagcggactcagatccttatgggccgtaattgtgagcaatccagtggatattttcgggtcatatctcgagatcagcgcgacttctggctcaatcggattgatggcgcacatgagatgttgtgtgtttgtccacaggaggttaccttgggcgccgggcgtaatttgtgggacatggacatggaggtgaattcggacatggaggtgaattcggacatggaggtgaattcggacatggaggtgaattcggacatggaggtgaattcggacacggaggaggattcggacatggaggtagatttttatgtcgaaatagataccgatagctcaaattcggactaataaaaaaaattcttgaccccaattacgtcggctcctcgatcaagcccacaaagttctatcaagacgtgaaaggatcgaatcccggagcattgtccctacacaccgatcaagaaaagtgggcgggagaggtttcggtctacactagggagatcactgatgcagactttgtccagcccgcagcattgagggaggttattggccgggagcctggtcaccaggataggcttattgacaatctcgtttccagtgataagggtgtaaagtacccccaattgcgcaaagctgtctatagtatgtgagccttactgctatattcgaagagatccgcccactgcagtgcagtcttacactaacactgaatataggcctttttagtcgagtcaacaaggaccttgggtcgaggttgcaagagcgtactgaagcaacaatcaaggccgcatgagatcgatctccttctctagtatctctgctgctctaccaacgtgcttgtgtctttggaaggcaattccaacgcgattggatagttttgatatgatttgtcttttatggatgataaatcgacagtagcaatacaatctgataattggctcccttatatgactaactcacacaatatttgaattttctgtttttcttttttttcttttttttctttttttcttttttttttttttttttggcattggtcgttccacagaaccattgttgggcaaacgacttggccgctgattgcactacggagcgatgcgtgtggcgaatgacacaccgcgattggctaagaaccaatcttctattagataagtcttgttgcataacaccacatgcagccaaattctttggcacataccgccaccagagcccagtggatttccgaatcgcactttagataatcgagcacatcatgttctccatctccacaggtgaagattccaaggcggcggggctgctcaaacactggtggcgggcggggtagtacaaagcgcgtatttattggaagaacagggcgtattccattgccaggctgctcacccggattattcaagtgtggactacctgtccgcctttaatgcgttcctcgattggctacgagttctcttaggctagcagtatggattactattgcggtactcaataatgttgagaaaaattgttcacttaaacttttggtgcaaatacaagtcctgagcaatagagttgcaggggtgcaatatctgaaacttgcccattttcaggacgaaccgctttgcatctccaataaacgaatacacctcgtgatcctagtcacagtaacagttggtgtgtaaattcatacagaaactgcatatatatgactcacatctgtaattggctgcgataaaaataacccagcctcgtctcgatttgactacgatttaaatctccttaagctctgtgagtccgtgttccacgtactaacccgtttaaaactaatttgcttaccatagtcacttgattcatgaggttctctcaagtgttgtccttcctagctggtttaggaatggctctggtcgatgctaaaagaccctctggaagtaggtaacatctttcgcgctttatgaaccatggctaaaggtagattacaaggccattgcagtagctacaaatcctgtgtggactaaagcttagagaattgtaaatcgagggatcgtcggtatgtccaatgctctatactcataacgtaacctaccagctagccatattaaagctaaatgcggcttgtccttattacgctagtcatcccgttctgtatttgacatgccatacaaaaacgaacccagcgcgaggaagaaactgccgacgttccaagccgtgccccattccccaaaggtgagcttagcagcaatgagagcagagaaaagtgaagccatcgtaaaaattatcatggtataccgggacttgatctcccaagcttcctttatcaagattccacggaacttcatctctcggagttttgggcgatgccactcattcatcatcatgagaatatcactattgccctaagattaatatacagacaacaagccaagcagtggttatctttcatgaacacttacctgtgtccataaattaccttctcgccctgaagaaagtcattcaaggatgcgagcttgggattagaaaatgcaagtttcataaggggacgtgtttcaaggttttcaagctgtctttcggcctcgaacttcgttttctcaggacaatccacgtctatatagtatgacgcacaggtttcgaaacagtctattttccctgtggatagattgtatgggcatgggtattcatgttcctgataattttcaatgatgctttgcagtctccttttctcgacttgcaagtccttcgttttatacattccgacaaactccacagctcctccggggcttcgtaagttcatacccgcaatagaaatctaagaatatttgtcagcaaatttagtagaaaactcttattctcggaacagacctcgactagttcagcgcttttgacaccaggaaaaggaatgtatcttctccaccaacatctatgagagcaccatgcctgcctgattgcttcccatatgatagtctcgtcggctgaatctgagactgtgactggcctaaccgaacactcatattctcctccccagcaaagaagaacacaaacattagcgccatctccaagcattgcctgtaactcagtccccaaagcatttttgcgagatgtgtgggcagcttcacggctgtctctcgtagtggactcgaactcaaagtccgaactttgcacttctgcttccgccctatgtgaatttctatatccacgggtatcaaggcgatggggtcgtatcgttcgacctgcaagtttttgtggtttcgtttccagtggtgaatcttccctgatgcgggcctggcgggtatgatgggcaattgtaaatggcaaagaaggtatttcgagtataaaatatgacaaggttctctgaaccagggtaggatatcgacgattatgatctcgcgatgttggaaaataacctcggttgaagttgtatacaggttcgtcgggtacggcctcttcgagacgactcggcattaaatgagctctttccggcaccaggaggttattcatttctgcgctaaaaattttgaaaaaaaaaaccttaaatgtaagccatccactgttggaagtaaggaagtgttgataaataagctatatcatcgcgaaccaacgatgaggctgagttatttaccccgcaccttcgtcaatcttgcaggcgcctaacgtgtgccagcaaggtttttgcagcagtattaatacgatggctgataaaactgcggtcagattatttttgggcaacctactatgaatctgcggaccacagcccgtcctataattagaccggccccagcgtgagatcaaccactaccctaaccatgctctcgaatccgtgggctgtggaaggcaaagctgagcctgtcaagtccaagaaggccacagccgccccatccaggttcgtagaatgcacttatcattggctcatcgccttggccatatcagcctcgcaatcagcctcgcaataatcgatacgctagatctcatgcctacatatctgagtgcgctagtttcagattgcaggcatattacttaggatgcggtgaccggagaacaatggctggattgtttttccaagaatcgatccctaatttatccgtagaccaagatcttgggtactatttgtgtcacaattttactccaaaaatgagtattaggcagccgtctccctgcaagctggattgtagggatcagttccaggtttctacggtattctgatagatccagctgtcaaattgcggggctgtgaataggctaattagttggaagaaatgaaattgttgaggctatgatggaattgctattatggtgaccttaagcagtctaacactatggctagaagtgctctgaagtataaattatggagctagacatgaatgcatgtgatgatgtgcataatcctttctgaagttcatcgtcacctagagattcttttcggttctctgaactggtgtaggatagtgggagacctagtagagtgagctccggtaatgaccgatatttctttcgaggcttactagttgagaagcaaagaaggaccagaatcctgatgtatccgccgggaaataaaagacgagacgaagggggaacttctaccaccgtcgtttgttgcccatgccggcgataaaggaaaatataccggcctacgtcgtgcgacacggttccagttcctcgatgaacgtactgatattattggtagtggagatttttgtcgcaaaaacccctgcgacactggtttttgcgggcgagagctgggtgacaatcataccttccatccaatgcaaacatcccaaataatttataactgtttttcaggaacgaaggggcatcacgtatcattgagacagttgggacaggatcgatactccgtgcgaaatggtgtgcccagatttgtagtgagcgctaattggcccgtgagataagtcctgtcgagtgtgttcagctgaaggggtcaacgcagtcagtgatcgcgcgacgggtgattctcgccctgattctcgccctgattctcgccctgtctatagtgcactcacccttgtcacccccggtaaagcggcgcacacccatttctcactcgggcgacacccaccgaactgaactatttaccgcgcttaagccgaacaccggcagatcagtagttaagtgaatgattaatttatatttcaatcagacacctcttccactttcgttgaaagtctcagaaactcggtaaacagtcttgtagaacttacagtcaccgaaaaaagatgttggaagaaagaaacgggtaaaggaaaaaaatgaaatgtatcttcgttggtcacaacttcaaaaattgagtgtttgacaacatttggccaagcttcaacgggttgacaggtcgagcacccgcacatcctaccgtgacctcctcgctttctgcagtctagatggacagacccacacaactcaacacaaccagcacaataaggccaggaaatcaagtccatcatttttagggatggaattgtaggcgcttttcggtgattcaaggttgagtcgctcacaaatgagatgatcacaacacgaaatatgagctctgtcaatgcggattgcgtatctcccacaaggtctcaatttaagagggccgtgaaggattcaacagtcagccaatgcttgaccgactctgcatcccttttccccaacgccactcttactcgtctctcttgctgagcacgtaaacgcatcaaaaatgtcgctgcaaatggttgctgtaaaagaaagacgtgggtttcaacaggcctcaatcaagagaggtgtccttcaacgcttcctaccaagttggtaagtgaagagaaacctatgaatacgtcctctacccctgcaatttgctctacgatttattcactcgattctgcaaagtcgagcaggcttgtgtctgacgcactcgataagttcttcccctttgatcgagtactggaatttataccgtactaacatttatagtatacatcgtagaccagcaaatcagacagttccagtactgtaagagacgtgattccaagcagattcactgtcccattcacgccagccgatcgaagatacgagatttggattagctggtcaaggtgtctatgcgaagacgtctctgctatagcgagctgatctactgtcgcggctccggttgaccacagatttgaagtgcaactgctcacactgtaggtatatgagcccacaagtccttcaaactgcactgacccgaaagacgcgggacaaccagatccgtggacgttcgaccacaatgcaccagggcaagggcaacagcttgttgtcgtctcttcatccctggtcttgaccatcagaacatgtgagtcgtggaatttcacgctgatgtactggctaataattgacagtgaacctttgggggctcaccagagcggccctgttaaccctgcagcgcatgacgccaggtcgagcggggaacggaatccgacagtcataacaaggagaataagatgcatccaaagacaaaacagcttcacaacgcgcgcagcgaacacccgacgagcttgcaagaattggaacatggcaacgcaagcaggggcgtgtttcaagcacaggagacagaaaggaaagccgacaagcaggacatctcggtggttgaatggctgcagatagacgaacttggcgcccacagtcacagcaaggccgattagataacattttggaacaaggagacaaaagcaacaagaggggcaaatacaggagagaacatactgactggaaatcgtggtggtaataaacagcacgacgttgcaataaaatgaaggacaaggtgcagaagacgaagcaatcatacctgctcaacatgcataagtatgcggagaaaaccctagaaccctaaagccaagaccatctaatccgaaaaaagcgacaataatgcaggtaccggtgggcaggaagagcgaataagcgacgtgcgtggcagaacagtccatacgtagttaagccacctctttttgcaccgtctcgcgcacacgtacatccgtgttgactattccctttctctcacttccttcgtttcagggcatttcggccatgtattatctcgtaatttcaatacgtctgacacctctattcccctctcccgaagcagctttcctcggtaggcgcacttaacaatcaatcgcgagtggtccaaccaaagatggctccaaaccttgctccttccaagcatgagcttatctacgacatgatccacagtggcgaacgatctatcactaagatggcactggccgctggttgcaacaagagcaccatctggagaatctcttccaatataagaatgtttggcaccgtcaaagcaccgccaattaaaggcggacgaccccgtagtatcactccactcatactcgaggctttatgcgaccatctgattgaaaagcctgccttatatctggacgaaatggtgatttttttatgggacgaattcgctcttcaaacaacgaaatcgagcatcagtcgcgcccttaagtccaaaggctggtcaaagaagactgctcgggtcaaggcacgataacgcgaccttgaccttcgggacgagtaccatcattttatctcagacttcaagtcttaccaccttgtctatgtcgacgaatctggatgtgataaaaggataggcttccggcgaacgggttggtcccctcttggtactgcaccggtccaagtgtcgaaatttcatcgtgatcagcgctatcagattctgcctgcgtatgcgcaagacggcattgttttgtctcgagtgtttaagggttcaaccgacgcctccgtctttgaagattttatcgagcagcttctccagcactgtgggaaatggcccgagccaaagtctgtgctggtgatggataacgcgtcgtttcatcactcggacagaattaaacagatgtgctcagaagctggcgtaaagctagtgtatttgcctccatattctcctgatttgaatcctattgaggagtattttgctgagctgaaggcctttatccggcgtaattggcaatcctacgaagaaaacccagctcaaggattcgataacttcctcgaatggtgtgttgacgttgttggtgcgaggcagaagagcgcggagggacattttcggcacgctggcctagctgtagagatatagcgctactgcggcagcagggttcgggactaacctcacgggcaaactagaacggattcgtttacggacattattgcgaaccatattgtattctgggctcctgcaacattcggatatacgaactgcatatattcttcgacatgtcaatgtcatcgtaccaatttctaatgcactgacagggtatctaaccacccgccaagtcgtaagcctgtaagatatcccaaatgtgtcgatccgtcttctctgacatctagctcctccatatcacgaaggacccgctcaatatattcgccagcgccgctaaggttcataataagtgcaatggcgcggtggacaccgagaagccggggtgatggcggatctaccgtgcgatgaggacttagggtaagcgaccgtgtgacgggaaacaaggggtcacgtaagaaaggactgcgttctgtcgagtcaatcctatactggtgtcgtgtgccagtgcgttcgaaatagatcttgaattcgccgaatagccggtggtagtccagcgttaaagtgagggcgttcatgggactgtcaattttgggtccaataataagatggattattccgggatcgaacatgtccaagatccgaagagcatttttctttgaatcgctctgtgcataacattagcaccgtcaaaataccaatcccaataatcgggcataccaaatcggattcaccagaagctaccgtcgtcagacaatgagggagaatgtgggcaacctccaagtattgaaattgatcgctggactcatccttcaataggtttccgtcatcatcagcacaagattccgaattctcctcgaaccgctttctggcttctgctctatcgaatttccgagacactacacagcggtggcggtcgcgcataagacatttctggcgcaaaacagatacacgttgcctcgttccggtcggtgttgagctctgcagcgatgataacgacgtgggcgttggttgtggtgtcttgactgatgatgctctaactataactgcgaattagcatatactcactagagatcaagcatatgtatatgtaaggaattaacgaacggggaaggagaaaattttcaacgataaactcagcaaacttttccaggactccatgaagcttgtttatttgttctggttcccatgaagaaaatccctcgaagaataccaaggcgtgagtaatctcagaatcaacggcatgtccttcatcagaacgcaggtcctcatagatgtatgtgaggaagaaagtcataaaggtatccggcgatgtaacgtgctcgagagtagcctggataagtgccgcaggccgatagcccttccgcccggtcttctcggagccataatgctgtacaagcgtgatcactaggttccttgccgactcatgctgttgtggtgttaatgataagggtattgagaagtccaaaaccccctctagggaggactggtgacggtgagtcgccatcgctgggaacttgcgagccttagcgtgaggggcgagtaagatggtggaggaggcatgtgatgagctgactcatcacgggtcaaggtcggcccgacagaatctccacagaacgcaaaggtagcgaagtgcattatacgggtgcactaataggatcggtagcaggcttcgagtgggaaacttaatcaagtcccaatattggcaaagaaacaatatggcttaggtggatatcttctacaggcggaaaactcacatgctcctggtgttcaacggtgttttatgttcaacgttgatgtgaacgttgattcaactttctgacatcattcaccacccgtatatcgcccaaggtgctggaatgagaacactcaaaaaatactatcaggtcggcacagtaccaacaaattatgacaaagaagttaaagtctccagagctcctggaagctcaaaacagaccctcggccggtcggatctttatcgtggcagcgcggcgcggctgaaccatcgccctctaacaacccccaagtcgtgagaaatgggactcccttccacacgccctatgagcaacaataatttggcagccatgttcctcctgggaatatgccctaaataaattggaggctcgagcatcatgtggatacagcaactggattaaaatatccttgattcgatcgtgcgtgtacgtaccactattgtggccatatattgacatccatagtcctcctaggagccggcgctgataataataacccgcaaaaccttgactgtggatggtgggcatgaccgcttcagcccgaaacatttaaaaggttataattgtccttacggttgatgctttcttgtccatcttttgctccaataacttgccagtacaacaccattactaacgaagccaatcaatcatggattataacctatcacaggttccaaagaagtccaataccccagacacagaaggccataatggacgtatatgccaaactggtatagttattttagatccccttctcgaggaatccatcgactaatatacctatttcatgaaggcaatgaattggctgaaaacttctgttgtgtcaatggtctattcatctacgggaatcgcagctatataagccaggttttacaaccgcctgttggctaatccactggccctgtagctatagaggcagttacttccgttggtacctctcttggtagctcaagggcctctacgttgtctccaagcgttataagggctgaaaaccaagacctgccccctctgaacgtgaaaaagagagcagccgaattttcaactgtcctacgaaagcgacgccggtatttatactctacctcataaataccgggccacttacaactggcgtatcaaaagagacccctatgccttataaaaattagtaggaaaatggtcaatggtacaatttaatacctataaacgctatccgaccgcatcttgatctgcgataccatttcccctagggagtgggccactatgtatctcgccacctaattgctacagagtaggtacgaagagatcatcgtgaggaaagagatggaaatagacgctgtgcccgattttgattcaccactaacacagccagaagagaagtgccggaagtgtgctgctgcagacgaggagcggctgtatgactgagacgtaccccgttctttttaccttgtcggctatattttgatagtgtaaccggtcatttgaacttgaggagcaattatagtgttatgcaaccgttaatcggcatttgagagcctgttgagctctaaatctatcagtatatgactaagggacttctaggtgcgaaggatttgaacggtttcctgtgcgatgtcactacgcttaggaataagaaagaaatgtacaaaaccagctgcatcttgatctccaattaatgtaatatattagagaaatcagatagcgtgtgcgaggccaattgcggatagtaatgaagaaatagcaatttcgtaagttaaattgcctcgaatgtcaaaatcagccactccttacattatttaacccgcttccttcgtaatggtgcaatagctccgtgccctacaagtatcgaaatatttgtgctattctgttaatcagcttatggctgctggtcctgataactcggcagtttggctgtcactttgagtctaaatgtcagcatattaatccaagtgactcattatggcattagttgtagactatattaaactgtagtattggtaagacaggtaattctagaacgccgaggcctaaaccagctgtgctagtattcgtccgagaattttgagagagcgactcgccctgctgaaaagcgagcttctaagccaaaggtatacctagccataaataagtctactggattatctctctttacctggctaatatggtcgttgcagcgttaactagatgctggtcgtatggaagttgcgagtgattattatatggctatgtaagtggaactctgtgcaacgtaataatcactggtaagtttgccactttatggacctactaattattgtaataaccatactatgtctgatccgatgcgctcgttgacttatgagcgaaatatgaggccgctattataaagaagctgccgcagactctggctcgcttgatagcttccgtctctttatttttggcgcgttgtcggttataggaaacctagaatctgtccgtggatatcattccctagcgctgttaagggtaataagattctgaggaagttgagttatgttgagtagtgcggttatttgtcgattcgtatggaatccttaattagctcgagattcatgttcgtgatggctgtgcagcttattgttagttggaaaaagatacatatgccgtcaacagtttgtatgtaagcgctgtggctcatcggccttatcttacgatagtcagtcgaagctgccatctcctatcatagctgagagtcgaacccgtaacaccgcgcgtataaaacaaatggaattccactttctctcttagttcttgcacattttggacccgagaaaacactgtcttgttatcatgttatccaacctattgaaagataacaatatgatatgtgaccttggtactatcaaagctcaatctcagctccctatttcgatgtcggcccccaccacccgcgagagtcatacggcggccactacgaaactaacagaacctcaccgccgcggtagattgaaggttgtcacggggcctcccaaaagcctttgcctaccccacttgtgtggcctggagaatatcgcatccgtcctgattgtaagacaggagtcaccgtgggatacctatcggaaagtcattacgtatgagaatgctggcaaagttacaattgccacacgccgcactcgcccgtctcgcatggtagccatccggacatacaggaaagagaatgctcgaagattgatttacagattcggacgcctagaaaacaggaacgttctctccttacatgaatgctacatgcacgaagatctcgcgttcttcttagttgacgacttgccgctgacgctggcgcatgttgccgcttttccatctgtttatcctagcgagacagaattgggatccattatctgccaggttggtccctcatgcccttcgatgagctgttctgacattttagatcctggatggtgcctgctacttatcttcatttggccttacgaaccaatcactggcctgtggtgacatattatttggcattgacgggatcatcaagataagtttgttgacggccgtatccttgcattatctgactaacatttcgcagcaagcttggacctttatatagattgcacgccaaagcaatccgaaatcgcatatattgtggctcttccgtcaatcatgatgcggctcatgcagaaatatgacaaagatcgcacacgtctgaaaataccacatatacgacgatagaactctttgcgtcgtatgtagaggctctcaacattacaacactcggctaactggatcactatactagacatgctatttttcccacctctaagagcatcttcaataaggagagaaatgcagtattgtccagggaaatgaaatatcgttgcagttgttgaaaaaaacaagtggcaacatataattcaggacaggcggctggcactccagcgcatcactcatgaggccgaaggtcaggccatagggatacaaaaatcccgagatgttttgcaaggacaaaagtctttccttcagaccttgagaggagtcatatccgtacttgaggcctcccttacacaccgccacccgccacccaaccaaaagaactttacttgcctatattcatatcttcttcttcccagacggggagacattttaagtcccgtgttcttcagttgagtaagacctacggacacttacccctcccacataataggttgaccaacgggttcaatagtatggttcgagaggctcactagcgggcttttacagtatgagccccggtccccaaaagcgcccagacttgcagcgtcactttcccaaagggggagtggaaatatggtgcgaatgcgtatgaaaatggaaaagagccgttcttccctcgcctttaggcagatacatgatatttctggtgtgcatcttctcagtttgtaccatttcatgctgacttacagacaccactctgaactgtcagacggacccagctttccctcatcttggaatagtgttggtcctcagtaaaaagcttggatgaagtacggaagacgcctccaatgggacgaacgcacggcatctggatccttgatcgatttagatctaagacagtagaagggcccctgcccatgcacctcagcctaccatctccgttctagaaccccaaacaagaggcggaacctcaaaaacattttgtcgccgataacatgccctgagcacgtcagttttatatgacagttccagtaacgattgttcctggaccagcggtcaatgcgtgataatttttgagcggcttaggctgggctgtaggcatcttagcggtgttcggatgatacttgaatggtgcttgaattcttgaaaatgatcatgagaggaatctatccattttaatactcgaaaggtcctttgtgactgaagatgacctattatatcttatggtcttggataatgtgggttcaatatgcattgttaatatctaaaagagatacataaagggtgtagattaaaacctccccgaccaccaccccaaaagactacatacactcaactggaagcatttagctttatagttcatcatcctctccgtcaaagtgaatattccatccatatgtcgggcccacacaatatgcgctcccaacgagcaacttggagttacaactgtccgcattcagggatggattcacttccaagaacaagctccaaggaatcgattcttgaacacaaatcgcggtgcaggttacttcaagctcctcattgctcacaacgtgccatttgccacaccgcagagttgttccattggcgacaggcacgtcatcgggcggtgtaatttccggaatggcgtaaccattggcatagtctggcgtagtcgtatccgtgtctggagcatcacccgttgagtttccggcctgcgggcccagacagatgacatgtccgtaagctacgtcgctgttcatgtgcaggtttgtacactggttgttgatccacgagttatacttcttcaaagtgaggccgtccttgtatccgacattttgggccttttcgatagaactgcaggtatcgcctgtttgaagagtatagatattgtcgcactggaaagggatgcagatcttcgtgcctgcgggaatatcgttacagtctctcaaattgacgttgcccatgaaaagagcagcagaggcgaccctgtgtgtctgagaaatcgagtcgcaagtgtctcctattatagaagtataagtgacatccgaggcacagaagtcggtggttggctcatagggatcgatgactggcgtcaaagggtctgggatatccgtgggcacagtgagtccgcactcggagttaatttcttgtagctgtgattgccagacttcactgtagtaggagtagggagtggattgcatctttttgtaacggtccactctgcaaaacgagcaaagctcgtcggttgactcgtcaaaggatgtttgtttattcaggacatctgttggcaaagtaatttgggttagaaatattgaataattcgcaaactcgagcgtgatatcgaacttaccaccgcaatacttcccagtatcggggtctttaacacaggactgattccacgacgcccagaacctacctcccctgagagtaagcgggaagttggtttggtcgacactggcacagttgtctgtgacatggtcgaaccacgacttgatggagacttcgcattcggcagagcagacctgcccagtgagcgtgtcattttcaaagccgccataccaacgagcaacttgaaacttttgggcatcatcagggcagtcgatcacttgcgtgagcgcggactgacaagatgacggaagagtgttcagcaagtttgcatcatattggtcctcatataggtaaaacccggtgaagttgcgtcggcctataatatcgttctcggcacggaaccaacctagcaaagaggaagtgtatccgttcttagcatctctggaccagatcgctgtttcaccaagggggctaattgattggacaattgcctttgtaacaagattgaccagccaaataccactgctttgctccacatggaaccctttgtcttgacagttgttcgtttgcaagcaaccctgagagtatgacctgaaccaactatagaggcctaggaaggaagatttagatataagcgcatcatcacaaaccggttcgaaaatatataaaacatacctgccccaaggatagagatagattccgagtccacaatcctcactgcccacgagctagtgcacgtatcgcaatcaacatcctcgggatcatcagggaatctcccaggcgtgaaaggttctggcattggaggactaggctggaaataaggcgattctgtttgaatcatccccataaccaagtcctttgctccagacagctgatactggtagaaaacactatgctcagacgctgtaccatacatccacgtaggtccttggctttccacaagaatgcctcgtgccacgtaaatatcgatctgatcctgtgaaatcgcgtcaagatcgtggtctgcaacccatgcccacatattctccatataagctgaggcttgtttggtaatgcgaagcaagagcgacccggcaatacaatccttacgcagtgaggaagctttcttgggacaattttctgcctggagatgggaccctatagcgccacccacgcggaaatgagaatctttttgatattagcaaggctcttggtatagggagtaacctacgtaccccaaattccggcagatccttgagtggattcatggacattccactccatgagaacagctcctgctgtaggcccagatgcagtaaacatcatattttgaatctcgagaattccaacatctccctccttgccaacttgaacagccacacggggattctccatatcctcaaatctgctaccagttgccatgatttgcggccaagcctgaccaattattcgggacccgagtggtacatgaatggtatccttaatcgtatagactccatagggaatatagacaaccgaggagatattcgccgcaaaggccaaaacactgtttaaagctgctgtgtcgtccgtgactccgtcgccctttacgccgtaggccttcacatcgaacacttgtccaccacccagatcgtaatactggggacggcgcctggtgaagaagttaaatgtctcaccagcataagacttacttccagttaacgaccttttgcgactgatagatggcaattgagtctgttgggcgaaatgaagcccagtatcgtcagcataaaggccaaacccccaagcgtcaaccatgacttcatctccgccagccaagagaggttcagtacgggtatcggcaataatggccttttggacattgaaaaagcccacgttctgtaaaagaactgctgtagagttttcctggtgtaaagatgtgcggataccggtcggtgtgttggctatgatagcatcaactaggatataagaaccaacagactggccatcacttgttggcccgccagcctagtaggaattagagaaatatgggaaaatagaaatagcaaaacggtactgacgcctccaacgacaacgattccagttccacacgactcgatgacgacatcttgcatcgtccatgcccagtcccagtgaacctgaaccgctgttttgcagttcacgaacactagttcgcttgtggtaaattgttgattaccaagatatgcgctgccttgtgtcagatggcagcttctcgggtgctgtgttgtctgattcttacccaaaatttccacccacaaaggtaagattgcccataaagcctccgcttccgttctccatgtagataccctttcttgcatcagcctggacataaaaaaatagggaataatggtgatgttacctgctgcgtatttccatctgcttgagacatatagaagtctatattctcaagagtggttccctgagcgacttgccaatggatagcgcagacgtaggcgttagggtcagtgtgggtaatatccatcttgaagttgcgaacactacgcaggaagttgttcgtattcagatacctgaatatatgtatggtgttagaatattttatattcaaagcatatatgctcgtcttaccattcctctgaatctgcaacatagacatcggaggtgatcacgcctagcccaacgaaactcgcagcagcaaggatagttgggtagtccatgggctataattggcaagaaagggtcagagccagttgaatcaatgatggaaaatggcaggcatcttacatcgccgaggaattgagtgttgtagtactgtataaggggactgctgatgagataggttccaggaggaaagaagactactgcgggatagatcgtactggagccacaattgactccacagcggccgccatccgagatcgccttattgatcgcaacttggaaattaattagagaaacaatttctctctactgtgagatggcgggccacttaccagtgtcatcagtcacaccatctccctttgcgccgtagtctttcacatttctccagacctgcgaacagtttaataaacttcccacgcggatataaattgagacttgatcaccttgtacccgcttggagcgaatgggctatttcctctctgttcgaggtttgccagccagtagttggaaccagaagtagcacgcttttgtaaactagcctgatgggggccttccgcaatctgatactctattccattatccgcaacgtactcaaatagtccattcgcatactggagacgctgcggaggcctgttggtgtcgttggactttgttccatattttgctcgaacctgtgcggacagggctgcctcctctccagtagaaggggatggtggtgaagactctgctagcacacgagcagcttcggcaagatcttccgggatcgtgtaagcaaagctcttttttgttgcggtgcttattttgtcgcggcgtttcgttggagaaccagagcgggaagtattcgcaacagaaacggaaagcttagccacggcatctttcgaataatccaggggaggggcaaactctcttctctcagagcctttggctgtatcatccagaatgtagttgttgaaattgatattgtcgatgcgcagcttattgatgactgatagcgcttccaaggcctcagagactttctggacagcagcagtatctccaaggtggttcatattagcggccggggtagatttcggtatagcagcatcagtggcagcaatttcatgacgtccataatgtcggtgtaaatgatcatgtttatggtgtccggcccatacagcagtgatttgacatacaagcataagccaggacaaggctgatatagtcccccgcattttgacagcaggatcttgagatatgccaccaagttttgaaactcttcttggactcagcgaatataaagagtggactgttgaaagataaagaaatcagacggtactgaaatgcaaactacccacggtgcgctttcgcaaaactgttggcgcttctaacccaattcatgtgggaggttacatcgcttgcaatagtcaaaagggtggaaatgagatgtcttggaatttctgcttagcgaattcaacgatccacatattacgacttcataagtcgttctataagggattcacatgcacaaatcccggcataagatccaaatcagaaccgtgccattacgttcgggggttatactaggcaaatatcggcatataatcgaccggtgaaatccgtgcccgaaagcgaggagcgaatttctcaagtaatgaaaaagaatgaatggcccacaaagcataaccggctgcctatttctagtggagggtctacaagaaaataagacggtttagcgaaagagtccagtttcggaaagaccgaaatatattcctacgcttgaccgaataggagactaagactaatcctaagcgaggtcgtcattggccaaagttaaaccagcggccaagaaaaatgggagaaaggagccaagaccctactgaagcaagtggaagacccactcagggatcctgatggtcggattggatatagcgaggacccaatttcaatgactccatagaactaggaacaaatactacactgctattccagtagcaggactagtagaaaagaagcgagtatttagcgtaaatggatagcctacacaagattctcatgtctcagagggcaagcaccccacaaaaagggactgagagatcgggccctggtaaatgtataaagattcatggtttgccaaaattcaatttcgtaaaacgaggttctcaaatcaagatgttgggccgatacttggtgacgctcgtcgctttgacatgtgtcctcttgataccggttatagcacaggactgtaatgcggatatgccttgtgctactggttgttggtaagtccttgcctagtaacgtgggttacatgcttggtattaattcttcttttagctcaaaagatggcttctgcgggacaacccctgagcattgtggtggaggatgtctcgcgaactgtgactataaacttggatgtgatgcaaataacccctgcgaaaaaggatgctggtaagggattccaccctgtcattatgtcggcattccataattctgtcaatctcattgtggttatcatatcatatagcaacaatttcggattttgcggccatgggccagatttctgcggtaaggacgtttgtgtgaacaattgtgaccgcaaatcggaatgtgaccctggcttcggatccgagtgggcggaaagctcgacttgtccattgaatgtttgttgctcggaatttgtaagtcatcacatcgtcgggtgtatatgggttttggcaggcactgacggttattctgaacatgtaggggtactgtggaacaaccaaggaatttgtaagttatactaaaccctgcacttaaccatccgctatttaggttaacagtgttcggtctgcgtatagtgcggaaacaagactgtaaatcacaaaacttgctcaaaagaccgatatctgtctagagtggtgggctactatgaaggatggtccactcggcgcccctgccataggttctggcccgaacagatcccacttggcgtctacagtcacatcaactttgcgtttgccacgatcgacccggaaacatataaggtcctgccagccgataacagggataaagacctttataagcgaattgctgccttgaagacatacgatcctaatgtgaaaatcctcatcgcgttgggtggttggaccttcaacgatcctggtcccacggctacgattttctccgaccttgctgcctctgaaaccaagcagaaaattttcttcgaatctttgatcaatttcttgtctgttcatgactttgacggcgttgatttggactgggagtatcccgaagccgacgatcgcagcggaaaacctgaagattataaaaacttcccgaccttcatggagaatctcaggaaagccctagatggaacaggagggcgaaacaccctttctatcaccttacctgcctcatactggtatcttcaacactttgacttgaaagaattagcgaaacatgtctcgttcttcaacattatgtcctatgacatgcacggcatctgggacgaaggaaacaaatggactgggtcttatctcaatgcccataccaaccttactgagattaaacaaggaatggatcttctgtggcgtaatgacgtgaaccctgatcaggtggtgatgggtcttgcattttacggccgcacgtataccacttcggggggttgtgttgagcctggatgcgagtatttatcgggaggctttgccggagaatgcagccatgaaactggtatccttctcaacaacgagatcatggacattatcaacaagaggaatctcgagtccaaactatacaaggaagctactatcaaggtcgtcacctgggatgaccaatgggtttctatggacgataaagaaaccctgggcatgaaggcagatttcgctcgcgagcaatgtcttagtggtgtgatggtttgggctatcagccatgacacaccaacggcagacttctctcgggatttggcaaaagtgtctaacagacaagtatccatgcaatttgataaaatcgataacgacacggtcattgagagaaccgaccatagccaatgtcgctggacaaattgtgcacagccatgtccagcaggatggtctatgatcaagcgagcggacaaatggaagacatacgagggtgagccaatgatggattccactttttgtttgggcgtcggctacgcctcattttgttgcccacctacatcgccccttccaaagtgtggctggtatggctacaacgatggtaagtgtaaagctggttgtgaggatggaatgctcgagattggctcaaccaatgagggatgccagtttgatgtccctcaacagtaccagtcagcttgctgctctcctacagatgacaatggaaaagaactgagcagtatggcgctatacaacacgtgcgaatggtctgaaccacttgtcctttgcgacgatggtaagtgctcaggcacgaaagataccgtgttggttgaatcgagccgcggcagcggcgttacccattgcagtgcttggaataacggtgaacgtcaccagcacaaacgcaaatactgctgcgatgcctcgagaaagaacaagaagttcgaaaactgtgaatggcatgatggcagtgacctgatccacccagtcacgtccgacatgcgttgctggtctggttgtcccgatggccagatccgtgtagcaatgaacgatgatggcaagtgcctttatggtggtgctcgggcatactgctgcgatggcaccgactacaccgagacagaacatctttcggacgaattgcaacagtttcaagatgagctaagcgattggatcaccaatgcaaaatgtgagctccatctcacgaaaagaagtggcggcctcgaggtccgtgaggatctttgtgagattgttgcgaagcattctctggttgtcaaactagctgcacttttcgctggctacttgaatttgagtggaaggacaagccactacaatcgcctagccaatatctggaactcggtctctaatacattcgaacatctcagtaccagatacatgcttccctggattacgtccaatcttacatatccagagttttatcgacagggctacgaagacactgcaagacgcattttgcaagtgcctgagtggtacgatgagatgattgctgattctaaaggcaccattttctgcacattagatttgtgcgaatacggcgatggcatgtgtgatcaggatgaggatactttggggctggtgcgccggcagactcagtggacagaaaaggttaccaatggatcaccccgtccttttctttaattgactaacgaatcttacgctttccagagagatgtacttgtgctgctgggaaaacgagcaaaggcaaaaaaggaattcattgattgcgaggacgatgataagaccaaaacgagagtccactatactcgatttgcatatcctggagcaagcgagtggcccttgacatccgttcaagctcgagaggccattgtcaatgcaaaaatgggcagttgcacagaaactgaagtgcgcgaacaggaagccactgaagcggacctcaatgcaggggaaaacaatagccctccgaatattaacagtaagtggatgtctgtgaaaataaaagcaaaaggccctatgaactaattttagtggcagcggagcacctcattgaagtaaaactgatggccctatttatgcaatgggctgtcaaaggggacaattgtgctgttgactgcggtttctttgctgatttcttcactcaagaggttatcaacggcgcacctcggacaccaggaagcggtcaagacctcaagcgtcctattgatcgcgtcatggaacagtttggaagcaaatccaataaggaagtattccgactgctccgacagagtatcaatgtgatcaaaggtgatgtaagtatcatctctttccgctgcaaactcaccatggacaagtattaaaacaaatcatgtttagctttggagcttaaatccagttccaggaaatccattaaagtggccggggatggtccaggatgaggatcctcgcaaggcattgactctaatacgcgatgtaggttgcttcacaacacaaaatgaaagctacatgactgactgggatttgctagactattgcggtctacaactaccaaaacatgccgagagtcttagaacggttcaaaatggtcaacgacggcattcgcagtgaattgaaccgcgcagcaaaggcatataaagcacagaagggcaaggacgtcgaccttgcagactgttgggaccggtttttcaaacagagaacgaataaaatgctagagacgggtcgcaggtttgttaacaccgcgattgagcaaatgcgcaataaatggactcacaatccggaggctagcgttatgtggaatgcccaggctcaggaggtccgccatgctctggaaactctggagagccacgtgggagagatttacatggctgatctcgagcttgaagaactcagttagtctgccgataagtatctaaacaatttctatcacaacatgtatatttttgcactaaatatacgaatgatccagtttgaaatacgaagtttgtgatggaccagtcatttgtgatgttacaaatcaaacacaagttacttgactatcctagatgatagatctctgaagctcatgatactgagactccgtgatcgtctcttttctcggctcgctaggatagcaggaacgagagaaaagatcgtaatcggacggacaaaggaaaacgtcttcctcctcgacgagtgaagaatgtccatctgtataaatcactttcccaggacgttccatcccccagtctccccattgttgttctccagtattcagattctcacaagacagagcaaactggaagacagatgtcagacaattcctgagcgatccatcgtagtgctctgaacactcattttccgggtcgtgtggatcaaaatcacagtcaatcacgttaacgtatccgaccatactagacttgtcatctggatctgagctcgccaaaatcgaccgcatagagcggtcatccaagacaaggcagtagtcaaatcgaggtataccgagcccacgatcgaaagcccggctttctacccattgtatgtgtcgtttgcgaatagcatcggtcgaggctccttctaagtttggatcctgaacgataacatttcgataaccctcgtaaacaaggctatggacatcgggctggaattggaactcttctaaatctctgaatgcagccattgcggcgtagcagtaccaattaagcttcgcgatcacggccgcccagtcctgatcagatgtggttgtatagctcgtgcgatagataacatatccccatggccaacctccggtcttcacagactggaaccgaaaaaaccgagggatccaaccattccagccattaggccatcctggttttgtactgaatcgctttcttctctcaagagaggtttcctcgggtggaaactcggatgatcgccacggcgtaacccatgactcgtcgtgaaagatgtccatgttatccgacatgactcttcaggtatcacagaatgaatccagtaggcccgctatctcgcctaatatggttttgtctgttagagattttttttacgagcgttcgctagcccactagcgtcttggcgactgagtcgttcgcggcacttactaaccctctcttggtatacacataatgaataactggctaaagctctaactagatatatcgcgatggcattatataagtttatccccctctagtcgttccaccttctctatctccagctggctatcaatttagacgccaatgcatacaaaatacttaacccacaagctagcacatgagcttcccaccaacggattccagttattgaactgcgccgccgtgatcccgtacttatgctataaaaaaaactacactaaagggagaggggggaaatgggaggtttgaaccaaaaccgtggtctttcgacattcaaaaggaccattccctcctttgtacatcttgaacgccaatgttgaccattttacgatcatatttaaccgagcttgcccattcattcagctaggaatatccatctagccaagacaatggcgagaatttcaaaacaatcaaagaacgccagcgtggagaagaaattactgcaacagaagagaggccggcgcaagttatgcctagagaaaaaggcacgggactatagcaaaatgtgcggggcggaagtctgcttgggcatacgcattcgacaatcagggaaagttttcttatattccgcaggcgcctccgagttctggtcgacactctgctctcaattagtaagttcaggtgagaatgggagatcacaagttttctagctctttcaggactcttactatccaaggccagttgagaggcatgaaaagtgcctctaaacgcaacactttgatggaccattttgagcggttttggcggtcgggcgggctagcagcgcatgtggagatcagaccccgaagatccagcgaggtcagatctcacgccctcaaggataaacaagagcatcaatcacaaggactatggtcaacttttcctgttcaaaagagcatagggcggagaaactcaaatcaacaaaaaattgtttgttttaaaaattcactttttgcatttccacttgtcgctggatcatattcgctcccatagatagcaacccagagggtccacgcacccatagttccctagagcccaaaatgtaattatgtacacatttacaagttaccacaaatcagtctctttccccgtaacgtataaataagaaagcagcccatatttactgcctattgatcaacaaactttcgatcatgcaagtacacatgtgaggacttcccacatgtgtaactcaagttcatccaacacatagatcggtcaacatagtatgtaagatctatgtggaattgctacacatgttccgcctactttacctggaaaaaatcaaggcattcctcagtcaacgttaaacttgtctggtgttcttctgaccctgtcgaatttcgtggtggtcaaaaaagcttatggtgggacctattgatggcgctcatgtaactacaaggttcctctgatgactcacatactgagcaagggcactgaccaatcattggagttctctacgcgcgcgcgattgacggtgatgcgggccaaccctttttcacatgcacgctgacttccaactcaagcaatagcaggactcccgatggacacagcacaattttccaagtgcccaactagctaggtgatcatgggatggcccacagtttcccaatcctttcagtatccctggagcattgccctctctggataagtggttcctgcgacaggccacagtttttcctatatgcggaaaccccgtgccgattgagtcgcttctccgtatcctatcggctgtccgatcgtgactgggcgcaagtacatgatgtggcgtaacgctctaccaagaaacactgtagggttcctagcaaattcttttgcccaagctgttactagaccataaactccgtctagttattttatgagctgacctcagagaggtagagaatcccaagcatgttacatcgacaagtcatactgcttcccgttttcatatagagaccgttcccaaaaatatttctgatgcctcgaccctaccctgctcctcatatcggttctgggtcaatgatattcaatatgcgagcgagaccttaatttccctctggaaagcctgtgaatccaaatgagtagcgttagtccaacatcaagaagatcaaacacaagtgcgcctccaaaaatgactgcatagtacgtccaggccaatgaacccggcaaagagagaacagtcacaacgatggcacaaggaagcatccagcataagtttgagccgagtgcttggtatagataccacctcggccccaagttggtagttgagtccataaaagatgtaggtccagtcaatggcctgtaaaatgtaagccaacgggaaaggaaacatcattctctctgcagaaagataccttccacattctttgggtgacagccgccacgtcgttcgaagcagataaataaagagcgaaagattgtatcccatgcacagatagcgcaatgcacacggtagtttcgaaaaccatgacaattccgcaggataaaagcgctggtcgaataatagctttcggaatgttaatagcttatccagacctcgtaagtttcagacgtaccgaaaacttccgctctagtggccttagggtattctatttgctgtgttgctcgaaaacggccccaattatgcccgacgaaagccaacgttgacgcttcaacagcctgaacagggaccattatgagcccccagcggattgtggtaaaaattccccaggccgtagcatagagatctccaagctgaactattctgttgactagccataaatagatggaattcctgatcgccgactcggcgaatgtgtataaacttggccgaactaatgttttcagtgcatcgaggcttattttcaagtttccgtggccatcggcttctcttttcttgcgcttcacaaccacacaaacaaagtaaagaagtcctaccgtcaccgataatatgtcgcaagttagtcgaataatagcctgtgttacaatggttggcgtatattttccaacacggaacgttgatatcagtaggaaatctaacacgatattgatcaaaaacttgctcgcgttgattatcaaagggatgtccggtttatccagcgctctggttgaggaagagatcgccgcttcggtcgcggatgtcaggccttggatggaggaccagcgtacataggcaagcgaggcatgtcgcacttcagccgggacaaaggcggctgcaagcttggtcgacgttgcaagaaatataacggtcatcagaagcccttgtgctgcacagacaatgatcatggtccaggcaaggttcagccgtgagtgcaggcttcgcgatgatttgtccccaataatcagccacgcagaacgcggaataccatcattcattacctcaacaatgatgccgatgtatgtgtatacatcagttgtgaccacctcgctggagcttaatttggcgacccatagcttgcttagggtgctgtaaacggcgggtggggcgaaggcaagtaggttgaagattgcggaaccagtaaaacttttaaatctgcagtcagcatccatcttcgatttcaagactgacatactcacgtctctcggctccagaacgcgcgtgtcctagatgaaagctcttcccctctgctcctcccttcgttggattgatgagcagcttcatcttggaccgttgtagatgctgcgttggcccccatgttatcttcttcccttttggtgacttacgcaacgcataaaaatgaaaagaggatggagagttcccaggcggtgcgttcccaagtctttgccgaggcgccaaagtgaatgcggggtccaagaacgtacattgctactgcatgagactcctttaactgacctaaatctttcggcctgcattgtaactgtatctcaaggcatgatatgtcacggaaactagaacttgacttggacattgtaagcgcgaggttggcactctacatagcttcttgcgagcctttcatacatgcattttcccgtggagaggcgaaagaaagaggggagcaggcgctaaaatgtggctgtggtccagagtgcaattctacaaggacaacagagccaatcatacttcagcggtacctagaaagtcacgggacccattctggagccacgtgtagtcccgagtagagactagggcccagttcggagattcattgtacatgtacagagacacatgcaaagtggaaactaatattgtggtattccacgttgttgtgtagcaaagaatgaattggcgcgtctggagaggatgcatgatttgttgcttgcaaaggtttcccagatcatgtcccagaaaacaatggctttccccgacccaattcagcttagcgcgatctgagtggggcgctgggagcgctgggaaatagagcgtgagtgtcccgtatttgtgtgagacctcgcagtcgcccatattagatgacggttctcagctagacagccacgttgtcccagtgaggattggttttacttccttaccagcttgctgtaggagcgggtctccgcagtagctttcattgggcgacaatataacagcgctgcggacgctagacggtgactgaaagcagagccagggcctagccgataactataaagagccagaggaatcctcttctgtaaaaagaatatcgaagaaaatctgtgctctctctactatcttactattgaaccgccttgatatctttctatctctgaatactctctacataatgcggtcgcatatcataattaagttgcccgcttctcaggttatatccctccaaatcctcttccccaatcaacagataaggcccgacaatgcagcgaagcagaccaagagatacaatatggtctttgttttcttaacttatcggccggttgggaggctggtgggcgagaagagatgagagcgcaccagactcacgatgcacttgtacataatgggacttctgtcgcctcactcttgcgccccgtctcaaattccatacgatcgaacaagccgcgccgccctcaaggcagcgtggggcgatggagaaacggctgcaggagctagagaagcaggtccaagcttacgatcggcttctccaggtctgggcaatatttcacactttggctgccagcaagagtagcttatgcttcgaaacatgaaatcttgataatgatctcggtgggtggatcaaggagtggcgatgaatacgttccctggatgaaacttaactaataatactttagtgtgtttcgatccaagctcctgaaattgcccgtgggggcgaggagtaagacttgattgtctgcttgacttttctagggccttcgatcaaaccacacgcactctttttgacttctgttctttaggagcacatcgtattcgcttgagagagcctgccattggtcggtgaaccaagctgcacccatggaagccaatgattagggcccgatttagttcagcattccatggaatattcccttgtcgaagatcctggtggaaaagagtttatctccttcaacgaccgttctatcgcaggacggagcgacttctcgggcttgagatggctcaaatctccaccaccccaacccataaggagcatgtggcgtatatctccagcgccatgtagaaagtagacgttggccaggtcaattactcccagaaaaactggaatcgctgatccttgtgcgcgctgaaggatacggtaaatatccgctcctcacgacaccggttgccacttccctacccacactcgttgtaatattaattttagctcgcgctagcatatttatggcttgattgaagtggccggtgagatataaaagcagaatggattagttgtcgttacattgtgatgctgccactacatccaggagtagtcagtcgccaacggatcaggcagctttcactgtcctgacagaaagaattagccaaaacatggcaagggccatcagagatagcttgtagcttacagtatagagggatgaatgtaactagcaagcacgacgcactatactggtctctatagagtacggaagctttttggcccgcaagcgcttcggaaagtatatcaggttctccctcacccaagccttgcaggaaaaataagacgttgccaggctgatcttaccattgcttcgccactacagggtaccagtggatgcatgcccattcgagattgttgttcaagcgagcccgccttgtctgcggagtggcacattaaggagaaatctcagctgtttatatgtggccccgaatagcaactgctgccaagagccagagaatcccctatgctggtgggcctcaatggggagcaggaattattctacatctagcctaggccaccaaagaacatgttgatactgctgcttaacgcggatgtcatgcggatggaaactagcatgcctcaaccactcccagtggcctacgaagcccaaataacgacgcccaccctcaactcaagcctccccgcccacttaacagtgcaatacaagcacggtcccccagccctacgaacaacggccgccctggcaacatgcgcacaccacgcccgcgcgaccacttcggccccgggagcagacgcgttgataataatgatctcctcttccacagactccggcgttacctccgctatctcattcatcgagacgttccggaacctgtaatcatcaagttgtcggcggtggatcttatggccccttgcttgatcggaaagcgagcagggcgggagggtgataaagacgggggtatggtccaaggcgaaggtgatttccttccccgtcccgggctgtctgaaagccagagaagcgctccagagccaggtacccccaggctcgaactggtgggagcgataggcgcggcggagatccagcgagcgtagttcccacgcggcagtgtcccgttgcggagggtgcaagttgaaaatctccggctggtttgtggcgcgccagagtggcgcaaggtccaggtttcccgcaatgacgatgtctcgagttgactctgcagaaggcggggggagcagtgcagaggccgggttgaacgccaccgtcgtgatgaggcagtgtgccgcgggggcctcctcgtccgtctgtgtgtgcaacgttgctgctgggcatgggccgacccagccgttgagcgaggtgacgccaggcaggcagccgaggacgcggccgaggactgagcggctgcgccagtagctgcactcgggcagcgcgacgccgcattcgctattcggcgccattcccacgctttggattgccggcgtgctgaggaccagcatggccatgaggacgtgtgcgaagtgcttgcccgggagcaccacggcgaagagccagtccacctggacagggtaaatgggttcgtgcgacgcaagccagtcctcgcgggccttcttagcgcaaagccggacggcttcaaggtacggccactgcatccgctctgcgaagaggaacagcccctcgagctgctgctcgtccttagccggtcgcggcgcgatcgttcggcccatggggtccaagtctgcgattctccgagcgcgcatgagcgccgctttttctttctcgcctgcggcttgctcgattgccttcaactccgcgccgagcgcgtcttgtgctttgtctaggtcctggaggatcggtagcttctcgtcgaatgcgtgtgcgaggggcacggcttcgcggaaggcctcgcgcgcccggagatagttcttgtagcccaggcatgccctgcccaggaggacataccccgccggacgatccgggtccagtcgctgcagtatcactgcatccctcgctgcatccctgtagttctggaatctgagcagccactcgcccctcgcctggacggtgtcgtagtttgccggattaaccgcgagcgctttgtagaagaagaccgcagcacgctgaaactgcttcgcctcggtagcctcctccgcgagacgaaccagctcccgtgcctcctgccgatcctgttcgggtacgccagccgctttggcatcctgcacttcccgcgcgagcgcgccatgcccgccaacgtggatcctcgtgtttgcaacccaccgctcgctggtaatcaacgacgcaaggatcgcacgcgtgaaacgagcatatatccccttcgtacccccggccccttgcatccccatccccgcccccgaggcaagccgcagcgcgagctccctcgccataaccatgcgcatccggtcggcccacgcgccctcatacgagccctcctggaaacgtgtcatcgtcttggcaataaccgagcggcccgaaatatcctcctgctcgtggtgaaacgcaaacaggaattcgagcacgcgctcgctgtgccccatctcctgcatttcccacgaccccgctataccctcccacgccaccttcccaaccgtctcaaccaacgcggcgatttgctcctcggggtcatcggcaggcacagtcccggatcggatctcctcgatcctgcagagcagcgtcgccgggtcgaaagttaggtcggggacctcgaggaggaggtttgggtgtgcccgctggggcatccggccgtgtgcgagttcggcgttccagaggtcgaggccgaagccctcgactgtaaccgtcccgttggcatgggcgtggtcgtacagtggtgaggcttcggggtcgaagaggatgcagtcttcctcgtttagctcgtttgggctctcggagtggcggcggaggtatttcctctggatccggtagagttctggtcgcggttagctgtcttcaagcctatataatgtgccaggtagcgtagctctatataccaaacgacggatgctccgcctccacgaacccgtgctccgcccccgacatcttcatcaagccggccagctttccatatggcccgtccccttgttccttgccaaaccgatgcacatccaccgcgatgcgcgggcgataagcggtcgcaacctggatggtaaacaccaaactgccctcccgttcgtctttgatgaacatccgcgcggcagcgagaccactgtcaacattcgcggcattggaattggctggcgcattcttccggccttcgtttggcgtcctctctgccgaggctgcggcgtctgtctttccacttgcattgggatccttcccggtccgacctattgacatcctcttgaatcgggctttgatgctgttcatctttcctgtgagatgaggcgtggaaagcctattgcctgaggtgaagtggaggagttactctgcgagattgttgggacgaccgtcctgctttaaggcactgcaacgccgtgcgctaatgcaattggatacgagccgtatgagaactcgctcatcttactgctatatgccgagagggccattcgcggggttctactggccgaaggtctgggcgggacacttggcagtttctgggcgtctaatcccggcgttggtgggatctatgtaagtccgtggtaagcgcagggtataggaactatctggtcgggtatatgtgggtgatagtagttattgacgagcattcatggacagagggggatgctgcagctatggtcttgcttctatgcttgattatatcttttgacatcaatattgacccgactttctagatattattccggctgtatgcgttctcatcgatacctcgcgggacaaatatccagcaacggtttgaatacatgctgcaaactgacttctgaaacgtgaaatcattccaatccggtttcggcgccgaggtagtaaatgtgcattctacttggacaaagcatatacgatgctatagttagcaacattccttttagtctagggagaatagaagttactccattttccgctcgatccatatatcaagcctgttagaggtaggttggatgacattctgaagggttgaagagcaagtgccagaagagtgccagaagagtgccaggaaagtgccaagagctacttacgaatcaaggttcgtgcatagtgtgatgaaccattggccaatttaccccggtctttgcatgatacaaatgctcctaggatagattcacagaaggtagcatttctcagtctatactttgtttgattggctggttaatgctagctgcctaggttttttttttcgtggtaaagataataccaaagctcctgggatgcattttgctctgccgggtactggtttgattggctacaaacgaccaggggttgctgcagctaaggcgcagactcatctgatctccaaacatcccactggttcccagattctatggttctgttggcagaggcagcctccgtgtgtaccataatggcttcaagcctaggtctgtgacagcgtttgcattagctgcatgggcatcggccttgcttgtgattagtcctcgatcttcttaaccacccttcttaaccacccttcttaaccactcttcttaaccactcttcttaaccactcttcttaaccactcttcttaaccactaacacccccaccctctacttgccactagatatctctgaatattatttgcgacgatgctcagtaggttgcttgttgacgcaaacagatgtgctgatctcaagaattcatttattaggtacgttagccagatttcaattttaagaattagagaaagccaaattaacatttcgcaaaatacattgtttacttttatttctcccccagcaggagattggactcatacggtatcaggttgtgcatctggtcctgaaaatttgcccactttacgattacactgacttggtctggaggtccatccagcctcacatagatagtctttgctcctaagccagagtagcgtcattgagtgtcatttagccgaccttcaatctactgaccatcgagggcttctgtacgaaaatctatttcacgattgattggacatgctatttttctgggtttggatcaatgttattagtcgatacagacacgtgatgaataatgattggggattggaaaactgaacaagaagtgatgttatacaacataatgaaggagagaaatatcgggaagtactcaaagatatacgtacacattcagactctttgtgagatttcacgcctaaactcaacaggtaaagacttccacaggggtagaatctaatagaagaaaagatgggaaagaccagtaccaatgcaaccgtgatgcttcagatcacacgcccttctcctgtcaaaaaaatcttttatcatgtatcaggagctatggaggctcgataacgccgaatatcttcatcttcttttctgacccgctccagcttgaagaagttgtaaagcgcaagaagtgctgaacagatgagaagagttactccagtaataacggttgttataatagccattaccgaccaatccccaccttgagatgtacagacattgatgacagtggtcagcagcccggcagcagcatgtaggcataggggtctagtccagaattagagttggatctggcttttcatacctctttcagttaggatttgctcacttacacaaacactttgttgatcagcaaggggtagtttcccctaagctttgggaaatgcatctgccacatgagagccgcaattccactaacaaaaagcaagcacgcaatggcgagtagtggggggttctgaatcatatgtagaacttcacggccggtcctgctggtttgtaacgtcttttcaacctggtttgaggtctgcaatgaagtgaacgtgccgggaatgaccagatagccggccagcagtgcccagttagccgcaccaaccgtgatactgaaacgcatgtccatttgtgcttcttccctaagaattttggcataggtagtttcgttggcgtgatgttcctggtaggctctacacagccccggggtcacatccgcagctgagcaaggcggaacaagcacagggtttattccaggaagtggggacttttccgatcctatcttcactggcatacttatatggttgttcacaacgaaggctatgaccaaggaaatttcagggttaccattggaagacaaatcaacaaagaactttgtcagttctttaaatagtccgtagggaaaaggccgctaccgtacttagtcaaactaggtctagcttctactataggtgaagcctcatttttgccttgcgataagccttgcatggtctggtttccgaagtcagaaacgaatggcttctgataaaaaaaatgcggaagttgttgcatacttgatttaagcggtcgtcatctgcgaatgcactggcggaaggaatcagctgtgggcggcggttgctgatatagcggtaacatcattatattaccttcagtggccattatgtctaggttcaggtatttgtgacaacatgggaatcacgctacgttttcttcggcggccaacatagatctttctcaaacaggcccactgatgagaagccagatccccactgtcaattttgctcgtatatacatagatatcttgaaacatgcaaggtggatagcatcatgtccattgatttgtgggcagaagggattgaacattgaggatcataagctcgctacattccgtgacgctctcgcggcagctgccatacgatgtacaaatttccagcaatatgaaacatgtcgcgagggttcggatctcagagtgtgtgccagtcggatcgtaaaccctatcgaatcattagcccacctggaccaccgccaaggctaccgttatatcttacctggtagtctctcgtttgctctatccgagtcattcgtcaagggacggcataccgaaacggccagctgctcgatcgcatgaatcaaatggcgaatctttgtgcgggagcctttaggtatgaagattggaagagatggtaagcaagatatccgagcttcttcgtgtcggacaaaagccgaaggttgaaatgatcccaaaaatgtacattgacgacaggcctatcattaggatcccgtatgcaattcgtctcttgacaccagaggccacctttcttccttagcattgcgtacgatactagatttgtatggaatccaggtgagtatagagtatagagtatcactcaatgtgatctccttccttcctttcgctgggtgtcttcctactaggcgagctgtacccctgccgagtatctttgtggtgctgtctccagttgaaacttctatatcgtccggggtgaagtcaacaaataagctcctatcattacagatatgcgtactcgatccggtatcgagaatccatcggtcatgtagagagggctcatcactttttgctacagatagcacatgctcgctgatctgtacggcttcatgcttttggtaggtggtggcaaagctaacctggttagcatattcagcctttggctgagcttcagcaaccaccttttccacccattgcttccaggcgaggtcctttgctaacttctttttcgctttctctagcgtacgctcattgagagtgtatccctccggtcgaattgcttcattcatgatatagcaagtagcaaccttatgcttcgggtgagagctgccacagggacagcgtctcttttcaaatgggagcttctcttgcttcacttccggtttcgcttcttggtgtccttgccaggttgaaaatgcaccttttggagcattagttgaggtcacagtttgaacacctatctcacgattcatagcgcggaatgattcgagaagatctcgagtatcgtacagtacaccttcttgtccatgacaatctcctggtatttcccttgccaccagatagggagcgcctctttcacagtgtgtaggaaatccctatttgcatctccatcattgatgccaaggctgacggcttgctctcttagtgagttccactgctgaagccattcctcgatatctcctgtcggcttctgcattgcaaagaccttccacttcatacggatttcttcttcgtacgcagtcgatcgggcaaagcgagacttcagatacacaagcctatcatacggagtacgatatgcaactagagagagacggtggattggatcaaggtatgtgaggatatattcatttacatcgctcagtccctttgtctgcttctcccaccttgtgtacttcactttgtacacatccatacggtctcgccagatccttcgttccttctcatcgccttcctcggggtattggggttccaccggttcttggagaggctcgggccgtttattagagggatcggttgtcgacgaggtgaggtctggattacagagatcccacacattcttttgtacggcatatagctgcacctttgcaaaccaggtgagccactgcggcgagtccttcagtttttcgccctttgtggcggagaggaatgatgctgcctccattactggattcaggggtagctttgcacagcttcagaatagcttcgggggttgcgagacacttctagcagcgggctagatactgtattccaactacagtagtctcattcagtgcgaaccgggctcataactgtcggcgtgggccgtattgtaaaaatgtagggtccaatcaatggtgttcaactctctgtattgctgtatcgacttccctaacaatttatacgggccgtcgattactaatctaaaattacaaaatgcataggatcaatggatcctccggtatgccggtatgccaatgcatctactccgacatattctgtcaaccttaggattcggccccaaaagatttgatctcataatttggctttttgatcgtcagggttccgctcggtattgagaaagtgaaacggccttgtgggcttactagtctcactctctaacaaagccatgcaaactcaatattattcttaaatccgatcatcttccagaactggggatggttggaaacctacaaacatagttatctccactaagggcgggcctactatttttgcacgttacatgcgtgcagctcttagtactatgtaagacatccagtttcaggttgaagctctcattttgacgcagctactgtttcatgcagagaactcggtatcacggtcacacctatagaagagctctaaatttaatataaatagctgacctagaatcttaaacctgtttgtttttcctaggcccctaaagtttttggtcctgcttcctggctctcatttcttgtcattcaccatgcttctcactaaattctcatctcttctattgctggccactcaagctgccgcacatggcctaatcacccgtatcatgggtgcgaacggtgttgagatgccgggactaacaggtaacgggttatcgttgagccctccgtattttcaacattggttaatgattgactctagttgttgatggaacgccacgcgactgcccctctgcggtgtgcggtgggcagaaagataccgcagtgatacgagagcaggaaatgggaagtatcaaggcttcggctttgggccgcactctaatttctggtcctgtagacccaaagagagtaatcatgaatttcatgacacctaataccgacacgcggggtcacacccgccattttcatcaaggtcttccatattctcgcaatattaaatcctactccgggtactaatgtcttttatagcccgccaactgatcaacgacgcggctagtgtcgtcactaatgccggcggagctattctgaatggttagtatgtgaatttcatgacacctaatcccgacacgcgggttcacacccgccattttcatcaaggtcttccatattctcgcaatattaaatcctactccgggtactaatgtcttttatagcccgccaactgatcaacgacgcggctagtgtcgtcactaatgccggcggagctattctgaatggttagtatgagcgttaaattttctttattctgcacaaaaaaaaagaagaaaaaaaaactaagctatctaaaggcgcccaggatgttgcagacaaaacgccttttggtggtgctatcaagggtaaaccctccctccttaaccaccaagatttggtgctcatgacatcaaacaggtgcgcaatcagctgttgatgatgtggcgggtactctaccacggacagaatctggcgcagttacgcccagtggcactgtagagaaaggggtcgagggttatgctggcaaaggttctgtcaatggattgccctctgtttccgacgcgggggtcatcacgatgacttatcatcaggttcgtcacaggccgcggctctactttactcaccccatgcttacttttccgacataaaggtaaaccaagacggtgcaggtcctttgtcggcggacatcgacgcaacgagtggaggtacggacattaaagcgttcaaaccagccaaagttatccaaaacattccaggggtcgcgggattttcaacctccagcaccatggattatgaggtcaaggttcaactgccctcagggatgaagtgcagcggcgttgttggtaacaccaaaaatgtttgcatcatgcgggtcagaaacaatgccatttcaggcccatttgggggttcggctgctttcacaaactgatgtgttggatcatcccagaagctggtagatgcttacagactgagcgctttgcctgtctgtctttgcctgtctgtctttgcctgacagcttggtttgccagtttctcggggtataaataccctgctttttccatagatctaggaatcaagatttctttcttctctctcattccatcttcatagaaatcttccagctaccggatctgtagctgcgtcataatgtaatatggaaatcactacaattttgaacacgttgatagcctactacatggtgcttgaaaccttcttaatcgcacgggctagaaaatatttgcatctagctattgtcatgaacggcctgtgatgtaagtggctcttgtctagtgaagggagatgaaggcaacggcttactatctgactccctgctgtcccctcagatccaaaatgagcttcactttcgcggaaattgtagagcgatttaatcttcctttaaattccgtttctgcaccaactacgatttcctatcggagtgggtcctcgaggaatcgatcaccattccctgtgtgatgccccggaaatcgacgacctttttgcggcgagactattatgaccggcctaaagtcattcccgacggtatgaggaacatggccatggtgggcagttcgtcgttattccttgtgaaatgtctgttagtatggactattgcgtgcgtcgggcagacaatagatcatcccatgggattaggctagagcttcaacgggtttgagcgagcgcattgcaatatatttgccggaaatatgcccctgaagcgccttaaaaagtgacaaccttgaatggggctcttttcttgtcagtgtcgttaaattcgaagtgcgcaggctgcttataggataattcgtccaatttccaaagccgctgtggcaatgctgcaatttactgtactacttaagacgtgatatatgtccctcctcgttatcgtagaagtattaaagtggtaggactctatgcaagagcaaaaagcaacatagaaggaattacatcccccagtggctctcggaaaatttgacaccagtcccctatttagatcattcccggcggagggctgcaaagagttcaagggctcattggcttccggggttgaaattaggatcttcgtcgcctgaggtctgcgtcaccgttaggaggcttgggattctttgcatgtgcgatattttccctcccagactgagcggtggagtaacgagggtctgtgtgaggagtgtcggagctgaataatccggagtctaggatgccgaattcgctgaagttgaaattattgaatccggaatcaagaagattgcttttctggatgtcatccgaaggaccatcgtctgaatcggcaggagagacataatctgaaggaagcaagtctgcccacttgtcgcccacaaagttaatctgctccccgattagataaaggagtttggctggccagatgcaccatcaaagatatcgagtatcatcccagtatggcatttgaagacctgcgaatgaaggccgtcgtggagcagtaaagggaaaatgtgttgcttattcggggataattgttgtcatttttgtgaccgaggaccttgctggcttttttggatatgctgcatgcgctccacggagggatggacaggtgttattggcgacctagtattcttcccttcattgaggcttggagaaatcgagggcagcgacaaccaattatgacaggagtgttgatcaggaggtgatgtcgacgaggagtcgggcttgtggtgggggggggcaactcgaaatcaaaggttggactcttgaaaagacggccggggtcatcatgtggagtgattgcatgattctccttctcatcgtcccgcttgtcgtgaggcactgcgagcgctgcattggggagaacagcttctcacaaataagacaccaatcaacggccccttttgagcgtttggggaaagcgaccttcgcacatgctttggggcgaggcctttgttatctgttctcgagataagtcgcacttccatattcctcgccatattagattagaaggcgcgctgcaggtcctccatcggatgctgctcatgtcgacgatgttcggccgtataagtaagccggcgcgtctcggcgctaatttctcggtgttggttgtctgcctctacgtcgtcgccattgtcatgggtactgctcatactaggagttactcctttggttagaatgaaagacaactcagtgggctccggagatgatgccaaaggcttgttggaggcagcctacctccgagttctgaaagcagggcgggaactgaacgggccagtctttcggttcctcaatggacgtttttctttttctctagtagcttcttgttccacctgtttcctgggcgcatgttcttgaacctatagagccgggccacacggattgcagaagagcatttggacccactcatcgacggtcttcccaggagctttcctatagatcttgaatttttgcatctcatcctgggcgttgtgttccaaggccaaccagaaaagcctgctagagtccacctctttttgtctcttttgtcgggcttatgtttaccagccagcgtaggatgcgtctccaagtcataagaaaaccgtcactgttcggtaaaccaacgcgaccgattgggaaacaagtctgcactggcaaaagccaagcactgctatccacaagggagccaacgtggctcagatgaatatcttctatggaagaaaatcatatgctgctggtgtttggtgtgttttgtgttcaagtttgttgtcaacttcctgacaccattcaccatccgtccatcgccaaaggtgctggaacgagaacactccggctgaaccacggccatctaacaaccccaaaagcgccagagatgcaatcccttcctcacgttcctattcatgaccaaatatgatctggcagccacgttgctcctggagatatgcttcaaaccaattggtggcccgggcttcatgtggatacggtaactaaattgaaacatccgcgattcggtcgttggtatatgtaccgctattgaggcaaaatattggcatctttagtccttctagaagccgtcgttgacaatggtagcccgcaaaactttgactgtggatatatccctcacggtggacctgaccgcttcagccccaaacaattaaaaggttctgattgtccacatgatcgatgccctcgttgctccaataacttcatagtacaacacatcactagcaaggccaagcgatcatggatcgcaaacacagtggacgtacatggcaaactggcatcgctactttagatccccttctcgaggaatccatgggctaacaaatttacttcatgaagacaatgaatcggctgaaaacttccatcgggtcgctggccaattcatccatggaaatagcggccacacaagccaggttttacaaccgcctgttgaccagtccactggctctgtagctacaggggtacttacttccgttggtacctctcttgctagctcaggggcctctacgttgcctccaatcgtcataaaggctgaaagccaagacttggctctctgaatgcgaaaaagagagcagccgaatcctcaaccctcccacgaaagcgacgctgacattcattccacctctcaaatatcgagccgctgtcaacgggtgtatcgaaagagtctcccaatccttatcaaaattagtagcaaaacggttaacgatacaattcaatacccccaacgctatccgaccgtatcctctgtttcccggataccatgcattgtgcatgttatgtagcttagcctaattaaatacctacctgaagagatcaaaatgaacaatattgcaggggcggtcagagtggtctgacgaaggaacgaagtcgctacagtccgctccaggtcactattatttcagaaatatcgtggctacattaaaaaagccgaatgagtcatattatattctagtttcatacatactacaaaattttagattcgagaactcgctgtattggttaacgccaatcaccagcgcagaaaggctttccgggcgctttgaacgacagggctaaagattctatctatccaagatattcccacacactggaatgctacattcctaacgctcgaacgtgcgaagaagctccaacgagagttcaatcactcctgtcagctcgatcaagaggaatggtgctaagtgcttttgatcacaatgtctttttccgttacactaagaccttatcagactcaagatgttactcttcattccgtctgtatcatctataatgagctcttctgctaccttgataatgcagatgagttattaggacacaaggctgttccctgacaaaggagaattctccaggcgcctcgggggacgagaatggagctctcaaaatactgcaaagtttctgacactgaacagtttggtacaatctatgctattgcaacaattatatgtccatcaaaaaatcttcagttcttcgggggcgacaattggaaagtgaaaaatgagaagggaggacaatttccttggtgtcgatctttcgggttataattcagaaggaactcgaccagtgccaaaaacgtattaccccccaaaagaagcccttaaaagcccaagtctcaagaggtcaaggaacaggagcttaatcttatgatggactcgcacgctgcatgcaaggagaagttgaccaaacagaggatgaaattacacggtatatagcaaaggatctgtatacctccctgctttcattgtatgttttttcagctaagtagtctaatagttcttaccaaatgcaaaccaaaagttttatggaagatgcataagcttgagtatccagtgcttgcagcgatgtgcgtgttcaccgtccgacccagacccattactgtgtcgtacggaagaccatttagaactgaccgatcacttcttggtggctcccagtggtagcaagaacggtatgtggacgcagtccaccgatcttccattccccgccagtcaacacatagcacagctcaagataggcactggaatcccattcggctgtcttgccgtcggggaacttcctgacatgccgagctcggacctgccaatttcctatcgcttcggtatcattgacacgtgtgaaggctacactcccgagaaaatgttgggtttgcacttccaagtacattagtaaaaacaaggaatttccacgaggtgataacttacatcttgggtcaccgagccggtcctctcggaacgcgaaattaacaaaatcgtcgggagggcagtgtttaaccaccccaacagctgggtaatcggtatagtcggctattatccgcgatgtagcgatggaaataaaagcatctttatcctgtcatggcatcaattgagaattgtagaggtaaacgtgggatactaatgtaattaccctacctttttgtcccaggccatggcccatttatatgccagttcacgaaattttcgctcatctgcgatggtgtaatccattattgatgggtggtactgtgccctgcgtgacgatgtccaagtccaaaacaaaattgctgcctctatttatgttaaggttagtgcgttttcaaaatccgtaggagtcttctgcagcttacaccgacgccgtaggttgttcatttaagggcccataataggggtcatgcttccaaatgatgtgaatgataatgcacatggcaaacttcacctgccgaaaaacacggctattcggcatccctcgggtttatcggttggatttcggagataagcatagcgtctgctgttcttcctgacttggttagacaattgtagtcggttcagtggcacatttaaggttttagtatccagttttagataatgatagacaacgggttttggtgttggtcagacgccgagatggcacgctaaatgctgcatctgcaactcgagccctgccatgaaacttgatctcgctaccctccggttactcctagctaggttttatagccgagatgccgtaacgaagacctacactgcccagctccgtgttcagttatctgtgcttgagtttctattgttcttgggcgttcactatcagaggagttagtaagcggaagtacggagctttcccattttgccgagcagatttcacggacatggatgctgtatgtgggtccgccacattttttcctaactagactgaaagtctgcatcgcctctttgtagccccattgagctcgcactgggcagcagtccttgccaggccgttgagactatggattaataccttctcgtggtgtccggtgttaatccctgttggggagaccgatgtaatctgccaaggttgtgcggttgcggcccgtcgcggggtaacccgaccgcacaatcactccaaaatcaggggatacggataataaaaaccatccgacttatttttatccgactcacactcgagcccagaagctggtcttgcgttaccagtagaagtggtgtcgccctacaaataaggcaggacaccccggagcttgcgtacggtctggggtcgcatagtgcgagatgcggcgaggcggtagtaaaccgatgacacaggcagtcaagctgactttggacagacctcgctcaaggcccgggggccttgttagaagtcgaactcgttaagacgatgacattctgcacttcacacctcgttaaggctcagccacgggcagccttgggtgcagctgttcttcgagacacaggcacaccgagacacgggcatcctcctgggagatacacgggctatctggaagagggtggtaattggctggaggccaccgacgggcctcgtcaaggctttgccacgggcaaaccgtcgatcctgtttagacatcggggaccaagcttggttagtggagagcaaccgacatacaccgccggatggggtgtaattgagggcttcctgtaagtcacggtcggcctggcggagggaggcttcctcaggtaacgcgaaacaagggtgcgaggtcttgcggggcgtggtatacaatggcagccactgcgacctgggtcgcgatcgttgggaaagatcgtcatcatcacgggacgattgaatcgacgtgcccaggcacatggcgagagtcctgaattatcctgtagatcagggtcgctgccaccagaaagtagcgaatgcacggacccatttctgcctgcgaagaccgctaggtggagcgccgttcggccatgtttgtgcctgacgtccactctaaggcagggctgttctagtagttacgctcttgccagctgattatctcagctgcctcaggaatgctcggcagcaagatatcttcccttttcttgccatgtatcacttctagcatgtcctcggtacaatacaaggtagcaagcagaaagagagtttcgtgcctcatgactgatcatgtccatggatagttccgattattgttctttgtggtcttatgcatccattgcgagttgtcgctgggaggtccggccttctttcccggtgttgtatccgcgactgtgcaaatggaaacaacacgttcgtttatatcaaaaagttgcccagattcgacgcccaaccgaattcgaacatcattgcagaccacattgtatcctgaccacgggtatgatacccaatgcgcaatgcttctttatttctcacgccatcactatagccagtgacacccgattaaagtagtctgaaaaggccgaacacaaccaacaatccgggaaagtcgcgttagaacacgtaatcagatcccaactgcgcttcacagacagtattgattttgacgattaataatagctatgccatgcgaaatgatgttactcagctgttgtgcagtcggtttctcaatcaagttgaggtccatgtcgttctgtatatcagattgatgagtttactgttcccgagaagcaggactctcatctgccgttcacgcaatccatcattgttcaagtttggtaattttcatcgcaaatgtagacattgagacatgactaaatgttgtggctgctgtcttgccttcttggagcggattaagccaacatggtacgccctgtctaaaaagcccaggattataaaatgaagaagatgccgcaagaggttacgtgtacagtgagagtctttatcgaatgccatttctatcctgatctcgacagtctgtccgggttcaagtggacaggtccggatcctctgactaactctactcgggctagtgaggttttcctccacatgtcagcgctccttttccctaaagaggtgcaatggatagaatttcgatttgtgcgatttgagcgggtgtctggtgagactataggagaggatatgttcttcctgccgcgggttgaaacggccatggggaatctctatcggatacgcagacagctactagacacaattacctggcatgctgttggtgtaacaggcactagcttccgactgtccctttagcctggtacggaatccctaccgtattcgagtctctcgacgcattctctgttgactagccttccccctaacgctatccctggacgcacggttttttgtatataatatatcgagtaattacgagtgagattgatctgaattaagcgggcttgtttgtatactcattttagtaaagaccacgataatgaataatgactatttgatgcccttcttgttaaaagcctcgggaatatataacctgctttgtatgtagcgtgattccccttgcaatgcgtcgccgcttgtcgtatttatatatttccaatataggacggggtaacccgaaataggcaattccttactcttctcttacgacgtccgttaaccctgctaaattgggactgtaggggtagttccagttatcgagtaggctaatcagttgttcccgagatgattccagtgcttgttcgaaaaagcgcagtcgagctacctgcttcttgtggtgaagctgaagaccgtccctctcttttctcaggtgtgtaccagcctcctttaagatctcattgctctgctcaatcttttggatatcgatgtgcttggaaacgcatgactcccataggcgtcggtagagtccaacgagtcgggctgctgggaatgcaaacttgggatcgtcacgttcaaggtctgctagtaccttcaagatgggttgaaatggctcggtcgccaaagtatgtcttgttactactttgtgttgcgaatgggagggctacgatggtcagccgaagaattcgaagccgaatggtttcacttaccaatggagggacatgatcagaaggatccacattattgcccttatcattaaggattggcaattcattgggctgctgttctccttgcttttcctggtctgacgagctgtttggggagtctatttagtctacagaagaaagttaaggatctggatagtactgtttccgacaagccttggtatctcttatagactatgtagacgcaggtggctacggactgaattttacgatccccatatcagtcaatcaacgcagtcagtttctgaatagaatttgcttttattttcagcgggcgcttggtagtgtatttgagaggaggaatgtcaacgagttggccgggaaaactgatcaagcctgacgatgttgagggccagatatgaacgcccattggcgtgagagatatctcaactagacgcctcttccactttcgttggaagcctcagaaacccggcaaacagcattgcagaatgggtagttcggatagtaacgaagagcaaaatagaacaaaaaaaaaaaaaaaaaacacaatttatcttcgaagtttggtggttatcacttaaattgagcgttgacaacgtttggccaagctttaatgggttgacgggtcatcctaccgtgacctcgctttctgcagtctaggcagacagacccacagcttaccacagaccaacacaacactaaagcgaggccagaaacaaaggtctatgattcatagtgatggaattataggagcttttcggtgatctaacgttgagtcgccaatatataaggtgactaggacaataaatatgtgaatatgtgcctgttattacggattgaatatctcctacaaagccttaatttaagagggacgtgaaggatttaacagtcagccaatattgcttgaccgacttagcatccctttctctcagtaccactcttactcgtctctcgctgggcatctaaaggtatcaagaatatcgctacaaatagttgcagtaaaagaagacgtgggtttcaataggcctcaattgagaaatatatccttcaatacttctaaccaggtcggtgagtgatagaagtcgaaaagcctatatatacgtcctctacccctataattgctctactatttatttacttgattctgtaaagtaggcttattatatctgatgtactcgataagttcccccctttaatcgagtattggagtttataccgtactgacatttatagtatacattgtagactagtaaaccagacagttcctgtactttaagagatatggttctaagtagattcactgccccatttacgctagccgatcggagatatgagatttggattagctagtcaaggcgtctatgcgaagacgtctctgctatagcaagttaatctactgtcgcggctctggttaaccacagatttgaagtgtaactactcacactataggtatatgggcctatagatccttgaaactacactgacccaaaagacgcgggacagccagatccgtagacgttcgaatataatgtaccagagcaagggccactcttcatccctggtcttgactattagaaaatgtgagttatagaattccacgctggtctactagctaataattaatagtgaacctttgggagctcaaccagagtggacctaataaccctgcactaccgtcagtacaaagccatagcttatatactatttctagccctatcgcttcgaacaatgcagtatatcctaggtggaagatcgcaaaccaagatagcgatttaataatagggtgcggagattcaagtgtaaacttagtcgtatcgaagcttaaggcgtccgtccttcctgatagtaagttatcgcgtcttctgctacgccggtccgattaaatataccaagccttgtgcccaaaatcacaataccactaacaccttcacgctattataggagtacccctcatcgacagtgaaatatactgtggcgagtggcctattccgctagatcgaggataagactaaggtggcgggcgaacagcgtactctatcgcatcgcatcttctgccttcgtccccaccgccttcgcactattaaggagtcctgaacctctggcatcgcaacgcgtttatccgccatggaagtgcaatatttatcgcgggtgggttcgtaacgcgcgtttactgtctcaacaaattgccttaggcaccctagcgcggcttttttgaaatgagtgcagattgcgataagcttaaatgcgacgtggtatggctggtaactgtattgcagagagttgtaagtgatctagttgtaaagccgatataaccattatacaaactgatcgttatatctcaagcgcactttgggattcccataaacaggtacactacgacagctcgtctaagatcaatccttgctaactcgaatcgtacaataggaggacacccttatttctgtcacttgagtcgaatgccacgcgaacaaatattttatctattccagctcccctatacaattacgattatatgctctctatcccttccacatgaatactatcgacgatgagttaccagaaagttcgtatcgcgtacctcggcctctgtctccctattaattctgtgtattaggtcattgttcgagttcgatttatctatatgagataactcctgaattccgaccagcctatacctctacctgaatcatatatatggccaagcatgcaacctttcaaatcttcaagtggcgtaggctgctagtatcaaatgcgtgatcctggttgtcttaggatgacatttagtgtctttctagaactggaaaaaaagcataggaatgctgatgttttgtcttgcttcctggcagatgagtatacctccgcagataatcaggctattagtacaagtccacctacaaggagaaggagacacaaaggcttcccatttttaacctacaatttaacattagttatctcaggtacaaatcgagagggtaagatcggggtataggcaagccaatgagagctcactgcctaagaatcacctcgagtatacaggaagctatattataagggctgtcaaaagtactgtggtgtgcccagtaggttcttatgtacccatttcctatctaagccgaagcactatctgcaaagaccatttaccctaggtgtcactgcagctacaggttagtcaagtcgactgcgcatatcctttatccgtttatatcgtctcctaatatatcacgcacttgtcaggaaatccggattccctatatccctatttcgacggtttttttgagaataaatcatatatccgtcgagcccaccgtgccgcggaggacacacaggtatgttactgttcagccaggcagccactgtaaagactttggtgtccgaaataatatcgaatcagaatgtttataggacctcttggactatcccctagatcctcgagcaaactttccactgtcaatcaacgctcatgtgatggttgcttttggaaggctggccagactgactactacgactacgagcggactagcactcctgcggggatatcacctaacggaaattcgtttcagacggtactgctagaacccaatcgggtttcaattaggtttcaaccgtgttctcttatcagcagaatatggttgattgcattaacttaggacactacttcccaaaaggcaattgccgtcacttcgatccaggattggttgaaatataatccgtcgttaccgaggcatagtaggagccaaccgggtattcttgattgcttgcttgtctaaatctcttagcaacatggttgtctctgcggtaaaattactttgattcttgcgctctctaggatatagtagctgaaatagggtaaggtcgagtgactcaatcgccgccttaagtgatggctttgacttcgcaaggcacaaagcctaccgtatggctaattttactcaagccattcgtttggtaccttatcacatgcttctatacgtgggtcttaggcgtattgcttggtcatagttgaaccagtggatctactatcactatcggattgaggctgtatgccaacttcaccgagtgatcagaatgggactagaattttcgcttacgaaacagaatctatagtgattgatacatttatctatgtgggtgagatgatatgaaaatctccgtactacgtctgtgagacattgatagacctcgccgcgggccatgaggcccatggattcgcactgaactacttccccctgcctatgggcgggcgggcggttgaccgtagtcccgtgttatttaatgggcccatgtctcgcttactaataagcacttcagtcatatgaaattttataattttataatgtttagccacgtacgcatatgtcctatagtactatgtattcaggttatttgagtagaaagtatataatgggtgtgttcagctataactaaacctagtaaaatcaatggactatcgagtctaagtgaaattgaaagtgtggtccgaaatgcaaagaaattgtgatgcgtctgcattgcgtgtaaatatatatattactacaaaatatgctgaacctataaaaccactcacaatataatgcctaccagttgcatcagtaaatttattataaatacgacatattagttatactacatactaggattcacctttattatgatcaattatctgctatactagtggttattaggggtaggtgacaagtgatagatttccaagagttgaacccccctattcaggaaacttatataatctgagggtggcatggaccgatggcaaggcctagacattgaccacctttttcaccgcccgatcaacacacatcaacacttaccaacactcacatcaacactcacattaacactcacatcaacactcacatcaatactcatatcaacactcacatcaacacttatatcaacactcacatcaacactcacatcaacactcacatcaacactcacatcaacactcannnnnnnnnnnnnnnnnnnnnnnnnnnnnnnnnnnnnnnnnnnnnnnnnnnnnnnnnnnnnnnnnnnnnnnnnnnnnnnnnnnnnnnnnnnnnnnnnnnnnnnnnnnnnnnnnnnnnnnnnnnnnnnnnnnnnnnnnnnnnnnnnnnnnnnnnnnnnnnnnnnnnnnnnnnnnnnnnnnnnnnnnnnnnnnnnnnnnnnnnnnnnnnnnnnnnnnnnnnnnnnnnnnnnnnnnnnnnnnnnnnnnnnnnnnnnnnnnnnnnnnnnnnnnnnnnnnnnnnnnnnnnnnnnnnnnnnnnnnnnnnnnnnnnnnnnnnnnnnnnnnnnnnnnnnnnnnnnnnnnnnnnnnnnnnnnnnnnnnnnnnnnnnnnnnnnnnnnnnnnnnnnnnnnnnnnnnnnnnnnnnnnnnnnnnnnnnnnnnnnnnnnnnnnnnnnnnnnnnnnnnnnnnnnnnnnnnnnnnnnnnnnnnnnnnnnnnnnnnnnnnnnnnnnnnnnnnnnnnnnnnnnnnnnnnnnnnnnnnnnnnnnnnnnnnnnnnnnnnnnnnnnnnnnnnnnnnnnnnnnnnnnnnnnnnnnnnnnnnnnnnnnnnnnnnnnnnnnnnnnnnnnnnnnnnnnnnnnnnnnnnnnnnnnnnnnnnnnnnnnnnnnnnnnnnnnnnnnnnnnnnnnnnnnnnnnnnnnnnnnnnnnnnnnnnnnnnnnnnnnnnnnnnnnnnnnnnnnnnnnnaagagtaaaatagaaaaaaaaaaaaaaaaaaaaaaacacaatttatcttcgaagtttggtggtcatcactcaaattgagcgttgacaacgtttggccaagcttcaacgggttgacgggtcatcctaccgtcacctcgctttctgcgctcaatcaccacacacatcaacactcaccatcaacactcacatcaacactcacatcaacgctaacggttcaacgcaacaagcgttcctagacaacactcatctctgtttgcctacatctgaatgaaagatgccaatttctattgtagcgaggaagttattggatcacaagctaccaagggaaaaaaatgtgaaatacgtcatttgatactgaagacgcttcaatttgttagtttatgattttggctgttgaatcgacgaagatctaactagggctccttctatgtatccaatgatgacccttcggaacaatgaacagacgatgaagatgttgcgcaggtctttgcttcttcgggtactcttgaatactctaatactggtccctagcaccacgaagaggtgcctgcacgggctagagggactttttgtcgcagatgtccctgcggagactcttggtttcgcagatgcccctgcgaggcgctttgttgacgcagggcctaggctgcggagaacttggtaatgcagcggtctcctgcagagaacttgttaacgcagcggtctcctgcgggtctcacttgtcatcacagcgtccccctgcggagttcacttggtaacgcagcgcccccctgcgaggattgttgttcacgcagacctatcctgcgaagcacctttttacactcgcggggctcgtggcagcgagggagcgcaagtcttacatcactgggcttgtggcagcgacagccgtggtcacggagactctcaagcccgcaggcaagagagggatactatgacataccggagtgtgaggaccgaagtcctgaatttttttgggctgggaatcgggctccttttatatttttcggctacgtctctaccaaggaaccagttgcgcagttggtagtgagagtcacggtctcgttaataagcgttgaagtaatttcaacgacgttgaaggggtgtttggagactttgtggcctatagactcaagtctcgacctggcctacttcctcttaaaattgtgcgttgagtatggtgaaccactttcatcaactgttgaaaagaaagcaacgccgcaaacgtatggttcgtacatatcatcgaatttgcaattaaatcgcttaacgcgcttacattctacatgtccccattttaaccacggttaccatttcttaatgagggttgaagtgcttcgacagatgccgaaataatgggctgtagactttgtggtcgacggaaacgctgagctgtacctggggttggccggatgacattttggtctcactagagtcaacccttcatctctaggctcgcgccgctgacttttatttctactcgcagctgacttatgttgtctttactaaatatctactccctgggcgcgtaggccttggcatacttgcaatctcaggatgaagattgtctttctttggcatgatagccaaaaagggcccagacctttgaaaagcttagacaagaaactgggtctagttcccaggataaccatgtgaactgatgcaaccaaggcccacgagctaggttctcgtgatcgccactccctcgcaagattgcaacgctactattatactgatgagaccctggagacgaaaagcacccgaccggccaatcaaacaccacgtgtgaattcagatagacgcaggtagggttctgcgatgcagatctcagcgacgacccaggggacagtagatcagggaggctctatttgtggagagaaaatggaaataattgcaaaggtccagacacgatccataagcctaaagttggctgctgtcagggtccgatggaacggggggttgttgcctaggcggtactgctggggcaggtgagtatttggaataacacgcagactttggcgatacaatgataggctacaacccgatccgtggttgtattcttggtcgcagtcatgagaaggtaagttcccctgtcaagtggtaagctgaactttgccgatctggtctgtagaacgttctagaagctacgtatcttctcctgcaataagcctttctccgatgattattgctctctttggaccgtaacaacacttcctctccatctctttaaatctaccgctatttcaataactctagcacacggcttgtaaagaactatgccaattatggacaaaccacatgagcttaaataaaatgcctccgttttactaaaaccgattggtcccggataatatttcgatgtgggccggccctcctgcggccctaaaccttatttcaatcgatctgcatatcttgatcaagatgctgaatttaaagaaactttctaataaaatgttggccttgccgcagtaaatttatcctatatactgcctggcggagattgtagtgtttctattctagttctcatttttgggctgtaaggtttagtcacgaatagaccagaaagtgggtagaaacctaggcttgaattcttcattaaaaccgcattctctcaccgagcgagcatttctatggtttattacaataaactctcgaaatgatttgcagttctgctactgatcggcagtcccgctcgtggttccgcagtctgtgtcaaacttaatttccttgtgactcgggcgtgggttgaaagcagatcggacgcttcgctccacagatcacactgttttcgaccaccgattcaatcaaaccctgccaggtatattttactgggctaacaagatttcagtgccagagccccttcctaccctgtcctatctctctatgggaacgcgcatagtaccgtaaatccttatacactgtccgcagtattttgtaggccacatgggccatgcccctggtttagaatgacaaggacgtgtagctgggcctgctcagaggtactacgaccatgctcgaatgttcacctttgactttggaactttcttactactgttgtaattccaaataagggtgattgctccttcctatacgaaatccatggagtgattcatatctcttatgctagtgtttattgtcgagtaagcatagcctttatggtaataatatatacctggactattttattgaaatagttggctactgttccttcgatatagcaatgtcgcgctccgtcgatgatatgctgctagtgtggacgttctgttcgccggtatctcagtttcctggcggcacagacacgatatatatagtcctatatctaggacgacgattgtgttctttgaggcgagtacggaagcggtgctggcgtcacgtagcctgtggcaaaaggtcagcctcttatataggaagaataaaagtattttatacgtattttcgagcgtgatgtttgagctggtttatcgctgtcgccagactggctagggtcggctgttagaattgtttgaaaccgtttgttaatgttcctttaggtagaggtattttctggtagagttgactgtgaaccgctatcgactagcgagtgccgcacgtcgcctgggcgcttttgtctgcctgaatgtccgggaactttggcgctagtgcgatgctgcttccgtagaatatggtactttttcccttgtaaagactcaacgcttcgatatacctgatattcttcataatatgtatcggagagggctttctacgataggccccgatgggaatccagctaagagagaaggtttttctcttcccgttctggccagctgtatgcgctacgtagggatatggtgatgcttgggcaagtcataaaagtgggaagaacggttgaataaagcagtagaaagtgaattcgaagaggaagggttattgagtttaaaagatcatagtattgtatataaatatggcgattgcgtttatgagccatggctcagcttggtgaactggtaccagactcttacgactcgccccagctaaagcttctgaaggccaaaagcctttaacttttgatgtactgtgtttcgttaagaatcaataacgttgaatggctaccgtgtacctgttaacaatataatatggttctaccagtttgttgaaatatatccgactcttagtgagccatgtagaaatagaatagatatctacgtgtagaatcagaatgtatgggtgaaaaatgtgtgcgcttgcaattcctgttatagtgagtaagcataacacttaattctagtcctgcgatataacttgctataaagccggagtgctttcttctatcacacttaaccagaagtaggaatacttatcacctcagtgtaactcagacgcagatataggcggaattcgaaaagcctcgcgccctcttcgcaattcctgttatagtaagtaagcataacacttaattctagtcctgcgatataacttgctataaagccggagtgctttcttctatcacacttaactagaagtgggaacactcgttaccttagcgtaactcagacgcagatataggcggaattcgaaaagcctcgcgccctcttcgacgaccagactttcggagcagattataacgtgcattgtctttatcgtccttagagtctaaggataccggtagtgtgtccagtaccgctataggggatataataagtgacgagttaccttcttaggaggaatacgactccggcgactaggaaaatagtgacgcagctgatgagagtgagtaagaagctatacgatagtagagaactgtgtttggatatgaaacggacttaggaatatgtgggcaaactcagctatccggagacagtaatacagttgctcttgaacgcctaacagagtaagtataatcctatacggatataattaagaattggcctactaataatatctagactagataaccgaatagggtgagctgctgtcgatactgagtgagagtgtaaagtactaaccatctctgtaggtctattgagcgcttattgtatgactaagccacctggaataaaactattcgtaacaatctggtcgatatcttaggccgattggcaattgttgagactgaggtacagaagttaaatagataaggtacaaacaaatctacagagggctagaagaccaggcgatccctgcgtcggtagcagtgatatgacctaaactatgttttaatatccgactagatattctagagtaaggcataaatctatattggtcttaagttatggatacgattcttttactaactgaaaatattactgaatatagacacttttattatggacgctgagttggagggttattagaaaaggtctgattgacctaatacgagctggtactagacgagctatatatagtttatcgttgtatttaggtcttcgaattttattaatacttgcctagattgtgtatactaaagctatcttacccgagccgagtggctatagtcgcgatctactatatgtaaacgagtactttaagccttttattagttctactattgcagatgatttgtactatctagtctagtatgattgtatacggtttgtataactgaagatataccctaaaggctaaagctacagtagtatataagaattatacgctatgtaaagatgattgtatattggttacgactattaaggtacaatccttcgtgattgatactagtagagtagttcaatgtgcctagtagttgagtaattgctatttgtgattgagttagatcaggatatactacagtaagctttagattgaggaatgagaagagataacaactgtagtatgtaagagaagcggggatttctctattagacctatagctataaggcctagtattgtcctgattagactattaagatgcattccctttatatggactataataaatatcaactctacagactagcatgccaaggtctttcctatttctgaagggtatctaagcggtgtgatactgaatctaccaggactgcgtctctataagtatcagtcacacctacttattacatttcttaatatataaaaaacaaccaaggagtagagagtggtgaacccgctgttaacctgcgccgaataatgtatcgagacgcctgtgcttacttgtactggtggttcttggactaaggcgcctagcgatattcttcggagtaagaaattggcaatatatatgattcgtaatcactacccttagaatggtttagtgataatgttgcaggaagcctgttcatgagctatctgcacgttaactctatttaaaaaggcaattctatccacaggaaattaaggcctagtaagtccaacgtagatattcgtttaaacgagagatctgaattggttgtgcacagacggttcctgctgactaggaagtgggacattcaattcagagatgctgaggtaggtatcgtggccctgagtagccgggccgctttgctcggccgggtccgtgtgagtcaccccagagcctggcaaataggatgccagttatctgttctagagggtatcgattgtgttctaaaatcgagtggttatcgataccatatccccgtgtgcctaatctagaaccagctgaatatcattctacagtacctgatcctgcagagcggcatttgtggactctagctgctgctgcaacttacagatcttgtgcccgacccgctgactgtcagctaatgctgtatctcttactgctatagccagctgcaatttcgaagtttcttcggttttctcggctttaagttgttctagtaactggtaatgtttgtgtctctcctcttctctctcctcctgtgctttttggatctcttccttaacgatgctcattatatgaagacatttcctataggacactttattatatttccgcctagggtttcgtgtttttgtgatagaggatgcctaccatagttagttaggagtacgttaaggtagttaccagggcaataggggcaatgttggccaaggaaaatccagaaaatattgtggaaggtagagattggtactgtatgcttgtgtaacccagtcgccggtttgagagggttctgattgtgtttcgatctagaccaagtagaccgaaggggataacaggaaggcgcagtatgcagctgtactttactacagtggtctgcctgttcccagaaagccttgtgattctttgccatgttaggtgtgctcaatcgtgagattaataacgactcgaagagatatagaaagcttgaaagaaatataagtagtgagttttgagaagcttaattatataggagtatgcggaggcctaagcgcaggacttgaacctgaatgaagccgctcttgctcctgcctaggaggtatgctaaataagggttataatcctaagaaaaatgagtactgggcgttaatacgaatgtataaaacacctaccgctcgattatggagggtatgagcaacaggtccgtacaaatatatatgttggtgtatacaaccctattttatgatagtaaggactaatcggccacatcctgcctaaagtttagtatttagacaacaatgttatctttcaaatgctttgtgaaatttgccgactcccacgactctatattggtcggccctaaaaaatagcggccttgtttttccgaattaagagttctcactttcctgtccgcatatatctggattccccaataagccgttacttgagttatgggggaaaggcatttcttgcggctaagactcagtagtaagggtatctatctagtgtccactatattatagatatgcttgggggcataggaacctctagtgctacgaatcaagcggcagttatagcaggtacccgagtatgttataattgtcaatttaagctacggcatgggcctcagccttcaccagttgaggttctactatcaagtacctaacttgagactcctacagctcacttccctggtaggctatgatcacagtctatatatactatatatcacgataccggcgattatttgagtttaaatgaatttggtaccgaattgtaaggcgtattattggagtgtaatattaacgctatctttaatatatgataactagggtactcagtaggctgttagcgcatataggatctctgttatgtgctccggttaatctaagacctcgcttactaccttatggatgccattgactgacgattagaaatcgcgggtgctaagttcgatcctaattccctctgtttgcaatgagtttaatatccgccttactctagtaattcctgctttcgcctctgttaacttattatgcagtttcttattgtgcgaccgaagaatttgtatatcgtggcggagtttattggcctcagtccggaccgtgtgactttcgttaagacagttattcaatcgggcataagtgcgttctaactcgatttctatgctgttattagcagccttaagcttagaaatctctgctgtgaaagaaccatccattccgtcaccaaaactctccgcctctaggctctgttagcaatgctgtattaataaggatgtctagtaatgcttacctcccttggaatacagcttgtatttgactgtgagtgtcctaacgcgtgcggggaaacagcctcgattgaatggccgatcttattgcaaattttccggtaaagataaatcttaccgctacttaagctagatttaagcacactagcatttgcgctcgtgatggactaagcgtatccatctttaggtcgcggttggagacagactttttcaggagcaactacgatgccaagtcggttatctaggagtattagctgagttattatcggtagggggccacgggtatatatattggccgctagggcttctcgatattgctgatttagttttaagcgcttctcgttactacgcttaggtatcgtagggtaccttcagcactcaaagaatattaagggaatggggacgcgggtatttaaaatatgatttagaactgacccttccgctaaaacaccggcttaatgtaggatcgatgattcgttctttcttaggtcgaaagtggtatccgtgggtagggcctaccagtatctattaaaattaggtaaataaagtttcagctgaaaacttggattagttaagatttggttgaaagtcgggtataagttttattgagaccttattaagtaaactgggctactgaagaaaatataggaaaaagtaacctcaatttctgttcaaatatatcctcaatcactaagttttggtcggcaaacgctagaattaatttagttggggcgtcttcacgctaccaaagatttctgccttccaaggtaccggcggaaccgatagtgacttaacggagggtcgaaagctgatgcgactgagcagactatcgggttcgctaataatattcccaaagacccagcgaatattagaatatatatattgagtaaggttgggtcgactctatatactttgcgctacctatctgttaaaattgcaatgactccaacagctcgccggccccactgccaaagactagcgagcgaccactatctgacgccattactgtgtgactccttaaagcttctgccatcaaagatgatcactcgccatgccggtcgtaacattcgaactgactcatcgagcctaccttcgcagcgagccaagaaggtccttaaaatgaggattcatcatcgatttcatggctcgcacgttacgttccgaaaaccaggcagaccctaaaggaagggtgccaaagaaagcccgcgccggaagggagcgatttcggagcgagaggctattcgattggattggatagggcgacttcgtcccaagccccatagacgttgttaggtcggacaaggatagggcaaacataaagccccaggggttggcatgccgcatttactaattttgttcatatatcgttgaatagatgaaattgacttgcaagacaatgagtatgataatgcagtgcgtgatgaggtagcccgtaaacatggactctatgtaggggattgctcagctaggcctcctatcgattgatataggcaaaatcgccagtatacccatgctttcataattgctgtgtattaccaagttgttctgagaagagatcatgctactctacatgcactgaagcaaggagaacgcagtttacggtgtagatagagtccatggggcgtcatgttctatttttctatacctaatttagacttgaaaacgatccgttgcgtgattcttgtgaacattttatcttttagagacagcacgattactgtaacaaactcctggtttcaatggtcttgtctgagccacccgtccacataccacaagctagttggagataaccaaggatccacctatttggctcacgggattgactgcaaggatgatgcccagatggcgatgatgaccagttcgacctgttgagtgtcagcattattggtataacggtataacgtgggaatctgcaattacctccaatgcaatcatccacgatctctctaacataccaatgacggcaatcacaagcaaaagaagtgccattgcagagagataacacgagatacactgcagcttagctcgaccggcagttgactgttgaaacaactaccaataccatgtaactacacaaaggtagtccgcgaagagaatatagaggctacccagataagtagattttaaaaggaaggttccaacgagggagactgctattttcgctaaagttaaagccacagagaaagaagggcatataaaacgtagtaattgaggcgtgagcgggttttcgcgctactggaagattatgcggatgtactgcagcattgttagttagaactaaaacactgtatatgaccgagttcggtatgctgtgagcttaccgcttatagtggtgggaatattggggtaatccaaaagagtacttgactctatgctggaaacctgttgctctagaacaacctagcaagaatagtaaaggaactacaagataaggcacacagcgctaaatcgactttatactaccgccagtgtggttggatgtaatacaaaagaaatagtctcctaaagttaagaagtagaagaatagttactaagacggatctaatgatattttgtgaaaccataactatactggactgccagctaatgttcttgtttgaacgaggccttgagatttatataccgaaatagagatatattggccaggtaatagtagataaattcctaggatgtctttatttgactctaggattttcttatactgagtttcctgcctataaaaaagcagatgcccttaatcttatgatacagaaggttaactgaggattcttagttgcggcttcggggcaatacttttgctctttttctatgtagacccgagaatagacatcacatttaaagcttgtagtatagtttctgatttagcttgtattatgtaagactatatttataagggccaatcacagttgtagtatcctgcttttatatagatatcgaggatatgcagaggtggtgtatatatttataaatacctaacttaatttctggagagtactgccattctcttaggacttagtcttcggatctatagaaaaagtaaagtgtatactcgctataatatacctggaagtcatataatgttttgataaaatagcatttacctttaaaatggctggaattagctatagagtatatagtgtcttgaatgagtacatcctaagggcagtttttatgtaccgcggattctctgtgttagtttcagcagcctatggttgtctgccttggacggacttattagcttatcgtgattacttgttcggccgaaactgtaactcgaacctttgcttaaggcttataatttgatgatgttttattattagcaaaaatgatacgtgtctcctttctaaagggtgctgggatcagaaaatgtggagaccggggttacaatatccgttcaccgtcataatagtatcttgctattcgtcggcatactatggaacggagcaaaatggatagctatatcactaaaatattaaagtaagtgagatatgctctatttatgggttttaatcgcttataatttttactggcggtctgaagtgcctatatattgtgttggccgatgagtagttgttctaatgaagttactaaattggtaatgatatatagattgtgtttcccttttcttacttgtgttagaaggttccagacaataggttatataggatatagttaattggttcctgtaatctatagcatgcgatgtgtaaatgaacgtcgatagatgtgatagaaatacttctgctattttaggtaaagtcaatccgctcggaatgtgggactttttaaattgattacgtttctccttgctcctcgaaaaaatatacggaggctttcctaactaagaaataaaagttaatgatataaataagagataataatgaaatcgaaaatagtatctagatcaccgcgatgtagatattttatatggtgaataagtcacgcacttgaatgttaacggcttatctagatagtagaccgagataaaccgaatgatggataataggatatgacgtttcatgtgtgcgagactttgtagtctactattgcctatatttctacatactagtctatatcacgatatataaggaattgctacctgcaataccgctttggaatactctacgaggccgtatgtcaagactaagtacatactatggagactgggctgctagaactggactattccaattctcttaagagggcgtaaagtgtacagagcacaactgtagaggttgagaagcactaatctgccgaatgcagtggccagtggagagggagtgtggagcggcttggcgaatgtgtgaatggatggtactaaggccaataggaccacagtggtaaattgaagagataatcgggcggaaaatgcccctatgtccatgtccttgaggtagccgtccgagaggcttctaaccgcgaccattgtgaaagccgatgtatacccaagttgtagcaatggttgggctggaaagagaaaagcgattgtgggaagagctgcggtctaaaccaggaataaaccactaaactatacagaatcttgctctttcgtcattttctccttttggaatgcactaaggctattctgaaagataatatatagataccatatggcgcttcctctaccaaacgctattactgctagagcgtatgggattgactgttgagatgaggggaaatggaagatcaagaatattagtagataaatgataaagtatgagaatctaagcgtgcctatgatgataccgatggcgtagctgcgcaggttttggtaatcgagagtgtttattgtataaagttagggtaagcaccagccttcttgaggtagcattcctcgggcgagcatttggctttatagacaagagtggagctcagcttttactgtattgactgtgggtgaggtattgtagaaatataagtgttgagataatgatgggggcggcgttgatcactagaatagtgaggaaccattatatctgtaatgaccacccaccttaacggccggagccttagaaatgagcgcgtttatattaagttgctaataactgcttttttgccttatcgatattcaaccagaccgaccgacagatagacctccgtggctatgtaattggtgtctcttattatgcaaatgtaggacctgtgagtcgattgtgattcttcctctcttctatgatagcactatagaagatattgtaccgattgtacgctagatcggttaataataagctcataatgcttattatcgcgattgctattccccctttaagctactctaagagcttatagaacatacgttcaccgaactataaagactttacaaatccggtaccgagcgctcgaccaattctgtctattaacttctccgaaattttcagaatacaatctgtaatctggttgaaagagtatacgaagcctaagcggaatacgagaagttctgctcagtgaatgaatcacacttagtgcgcgttgtcttcgagcctattaggagaatgtatactaacctataagtctcattgcagggtataagatgatggtggaactactagcctagcatcgttgcctaggaagacggatgtgtacgactggtaactctactatggtgatatttttaaaggcgggatttctgtaaattctatagagccgcgtgaaaatcataatgtactttgtgtaccacagtatttctctctaaaagcttatatactatgtaggagcccactaatacaaagctcttatgaattagacacagctatcaagaagttccgattactacagaatgtatactataaaggcgagcaatatttagccccactatctgccactgtccttatatatcatttcccatacttctagccgaatgaccatctataggcttagcaattagatgtaacagcagaaaagatggactaaccatatggttgaaccactaatagaaaagaaatctgctaaccatactgtggtaaacatcttagctctaagggtaacttcaacgctgtaaggctgcagggtattcttgaccttagaagcaaaaaccctatatatcactgtgaccgcaattgtggcagtcgtaattagtatcgaggaaagcttaatttatcagtatgtctcttcaatatttgtccaagtatcacatactgtgtaaaatatggtaagtgatctgctgccttttgaaaagaaaactttgcgataagctaaaactccggataatgtggttaccataaacccagcaatatataaatagactacactctgggaaaaccgtcggtagccggaaactaagcttaggttaatatctggaagtatattgctgagatttatggatgtggaatcaagtacggcggataggtcaaaagtaaaagaggtgctggggtcagaataaactatctccgagctatccttggctttatagtagttccagaggccaactaaatagtattgaggcagatgtgacttaaattcgtgtacctaggcttcgactatgctgctggcagctgacgttgcctcatggattgcttcatttgcactggtatggatgctagatgccatgccttcgacggcatttcttcccttattctcaataagcgcagtattaacattgaatgggtcccgaatttgtaaatcacgcagctttagaaattcttttaggtctacctgccgattgcttagcattgattagtatggaagtttttcgggcgtatcttacttttagaaaatgtagacccttcggcgaggaagatgacgaatatccgataaagataagagatagatagactagaatggcgacggtaaatgataatgctatggttgaaactagcgaatccaatctgctcttggtggaaagctttatggctttagaagggagaagatagaggagtgtctcttgaccgaataatagactttaggatcgagagaataattgagaactatgctgtatcgcaatttagggaagtatatatataagctttccagatatggttaacttaacctgtgtgggcagtgttctgcaaatttaactgaggccgtcgcaattttctgccttattctatgggtagtagtagataaatgtgttaggtaaactactagtgaatggggatctataatacataggtgttgtgagggcaggtagataattgatagtattaactaccggaatatgagggcatgtaattataagtgattaggctggcgagttagatcttcggcctacaattattctcagatagatttaataattaaggtggtataaatactactgtatagagtgaccctcgatatctaagttgtctttcttattattccatatacctcctcacctataaatcacaggtgacttgtactagatcccgttatgttattttctaggcagtcagaagttgaacattgggagcggaaattatatgactatcgagaaagttatttcgagctatctgccagagtgtatatctcttacctcgtcttcgagagtgggtttagaagacggatggatggccggcagaatatctatcgattaatacaaatgatgaagatataaggctgttaacgcttgatgagggacaactacgtgccggtgatagtccctagggcttattggtaagatcgcgtgcggccccgatctggcggtggaatcattcttagcttagatatagagctagactataggttgtgcgtatataaccacgagaaccttataacagctgtaaggaatttccttgaccacgataattagtagtggattgtagatatctatctaatagataatgaggaaggtgcgtttgctcagttttagttcttagagattgttgttgataagtttatagtgttaccagacgaccatagaaatgaagcggagtctattcgtcataaattcatccaattactgaaggagcggtatctaaacgacaatcgcccacctgatggactgatctatgagcggattaaccggtacgaaggctaccttgatatgcctagggatccgcttgctgcgaataactggtgggctgtactggaggcccttgtgggaagtaagaaaggaaagtatttgaagcaattttttaaatatgagaccttatactaaaagctaaattctttgcttattattctgggtctctggggagggatgcggattgggctactttataaactgacagctatgtattgcgacgaggtaaatttactctgaactataaaaccagttctatctcagctaatttgattgtaaatctagccagtagtatgctactgggaattgatcttctctactttttcgagactggttggaggaagggaagagcttttattgctgattgatggagttacagtcgagctgcttcaatctcgcgtccctaaaatctcctataaagatttgcaatccttgtaggttgagttggaggagggccgggttttcccgaacttcttggaagaggctcggtaggatatatgggcgcgtttgaaagagatcgattatccaattctaaccttgaaaatattttttaaagatcggctctatcttgaggtggctcaaagtgtcataaagagactgttcgtctagccgcgaggggataagattactattgaccagggtgtgtatgggaagtatgacactccggttcccgtctcgatggcgctgagataggaatggttaggatccgacctgctcgaattttggcgctttagcttctagtatggatttgaaatgaccgattactaatgccttaaatggccgatagacgctgatcccgaggatatgcttgatcggcgaagctccggatcgtcctttcttcctaagtaggaaatatggtgccatttctttacactggtgagagcgagaggtttctaagtacccgtcacagacgatatgttatttgcaataggggagctaccttcccctagagtgtgcgaatttctagaagacttagccgaagaaatagaagttgctaaaagatgtgggaagccgtactcgaacactgttgaggcagatcgattcgctttgtccgcagagacgctgcggtaaagtcaagcctcggttcgagtgacggcggggtttctccgatagtctgtttttaaggcgttctttgctatctgtggaatagtaatagttaaatggccggtggtgatcctcctgacgataatattgaagttcactagcgcggcgaaaggccgactactgtaaatgttggtcgggctatgatggccatagacggtatggatgtggatcctgggagccttaggccaaaccctcttgttactttagtagcgcggatgtataatgccgcggctactgcttcactagctgatatactgctgccgttcggtgttatgactatcacggttggacgaactatatgaatattagacctactaatccacgacttatttatgaaagacttttcgactggtctatttaacaataactttaatgtctagaccgatgagagggaaaagcgatccatttccctatatatgtgctactcttattatctgtacaatccgttgttggtgctatacgccgaatttagacaaaatgagtatactacctacgctattgtaccctcgtaaatcggcgctgggagtaagagaaggatgcttgatgaagacgagcagatggctagagcggaaatatggttacaggagtaaattgcgttgctttcggatcggtgtaacggcgacgaagacctttgacgggaaaggaggtatcaaatttgggtttcactaaggccttgaagaggctcacggtatagaggaggcctggtatggtagagatggtatgagtgaggtatgtaaaaattcatatcttatgatctattatatctcagagcatgttcctgtaaacggcaacgttttagcttgaagcgagtaagcctatggtatctatcttatatagtgcgaaggaatagataataatgtacttcttgatttattgggatgtattgtggttcgattaattatatttattagatatgcgcttggtgtccggcactgatcgttatttatattttacagctgataattagatgtaagttctatagcctgaggaatctcaatggcttcaactattctctgatttatatactcttcttctatttaacacatagtgttatacttgtagtttactctctggccactattaagggttctataccatatggcgtcgctttaagtttaataagtgaggtgctgcctcttttatctcaatggactatggtacactccgccgacttaaatacctttgttgacctagaggcgcaatgataaagaccaccctcacgatggtccgcctccctaaatatataattagataatataacttgaattcctaattaaagagtggcttacttgataaggcaggtatttaggttgagttccccagaacccttcggcgagggtattgtggtggggctatgtgtctcgctaggtgcgcttggggatgccgagatgcttgtaaagcttgatgtattcgggagctcgcagctagagctcgcagtatgggtagtagacccggtactctcggtactggtgcttgtctgttgttaagtgctttcgcgtcttgtagtctctttattcagtggtggcgattggtatgaataattgccctgctgttgcgagggaaccttattactagctgccctttctgtatgttgccttaccgaagctattaggggaagttgattgtctagggagactgtaatactacgacaatcgatggaaggcctattaatacctgtaaaggttagcagttaggtataatgcgagggtagtatgatacctatatctactgagtgtactttctatctcagcctcgcagttaggtgataaggaaactgattgtgtgtgtctagaagttgaaagtgtggtatttaagcttccttttatagcttggtgctatgtgctgactgtattatatgtgaattgaatgaggggcctaagattaagggcttgaatctgactgaggatagcgatgactgtaagtagagacctgaatatgattaaataactttggtatttaaagacctggctttggcgggtggtgctgcgaagcgcttttatattattaaggctcgatgagtatatttctgaggtattaatttacctaggaggtgtggtaatcctatgaaagtaaaagaaatagagaagaacgatgggtggtgtattattatgttggtattactagtattaaagaaatgccgatgatattgaaaattgatgctagcgggagaattaactcttaattttgggatagcacatttgtgcctgtatggctcaatttaagattccctgtgtgtgaagctataactttagaaatatattatttctaagacctaagagatatatattatcctcgatctccccctctttaatggactttgtctatttctaattaacgtgatgagggccggtatagattctgctagcattttgttgctgcttctcgctgttttagtcgtgagtggctgtatattcgctctgtattatgcgagttttatatactgactttcgataggttgtaaggccctatgatgacccgatctatacagcaatatctacctatctagtgcgatccttagaaagcgtatccgcgactgtgacccgctgacgtattttctagtattattcttcgctaatattcctactgccgaaactactgtatgaaatgattatagaggtcggtccctattattgattgtttgtaagtatctaatgattgtaatagtaaactccggcttgtgtatatttgcacggaattgcttatatggacgctacgacggagaacattgaccacttgagtaaagtcagcgaaaccttgtgtaacgttaatgctggaaattgttattgtctgttatatgctaacctatctggtatattcctttgcaactatgtaagtgctctaaactttaaggtaaatagggctccgtgctgacggcactaagagctacgagtgtatcttaataaactgtggaagccttgtgctactggtgacaaaggtttaagaaatatgttaggtcgataacttttatacgtttggaataatcggtagctcttcttaaaacgcgagtgactcgattgacttttacttggtagttgtaggcgaatctatggggtaacctatagagtagtttagacctcttggccttgccactgagtcggattggtatttgaggtggactaattaaggtgctgccggagtgtagcacggatgtgattcacatttccgtatatatattcttttagaactcttaaattagggagctgtttttcctatgtacgcgcttgaaatgagttttactaatttgttctctttgattgcttctctacctctaattttattgacgctaggcctaatgtagctagtgaatatttattgccctttttcctatttgatatctattgatggggctaggctagatgtaggccgaggtgatctgactaagacttaggaaagaactaaagagaataaaatggggaaggaatttctagtggacctggaaagcttgtgcgttggtagtgccctttctttaaagtatctaaggctatcgctacttaagaagctttttataatgcttggaatagtatacgccgcgttgtattgtaaaattgttgaaaactagtactagccttaactcaattattgtgcttatgcttactgtatgaccgatgagataatactttgatagtacttctgcctaaaatagctaaaaagcataaattaaataatgttacgcgcgtagggaaggaaatcggttagttactagagcggttaaccctggaatattcaccctatctctattaactggccccttactatatttctcgagataatgctgaactaataaagatctaattaaatatatctgccttagggatagctcatttttagttatctcctgcttgtatataactacctttgatgaactgtttcgagatgtcagttcttcgagctctgcttataagaatgataagtgtgtataaagacgcgaaatctgttttgaattttgataaacagcctgactcagtcgttttaatttgggccagcctcgtctctttagagtttcaattttggctaggatttagcttatatctaatagatttactaatagtacctgagattgcttggtagggaatatagtcttataattatccctctttcgctgaagtatctgtttagactacaattgagccaatagatacgataatatagctgtaggatctaggctaagacggtgaatatttggtattattgccattaatattcctaccggccgctctactttattcttaacggcagtgatacgatgagttggggaggtgttcgaaaagagtaaaactaataggatcatataactgatatagtatttattagagatttggtcttgcctatctggcgatacttttgtttctatagctttaccgggattttggctaattaattgatacctagaagttataacctagccggtacagatgctatacgtactacctacttatactgtgggtatattgaagctaaagtctaatatgatgtacggtagctgtcctagacttactgcgcaggactagtaatattaaatagagatcaagtattctataataactggaacggcgctatgagttttctagtatactataatgcgaccgcagtcactattatcaatctttgaggctaggctatttatatcgctctcggtattaataggataaggattatactagtaggaagtagaattagaggtagtagacggtaaagccttattataagaatggctatatccgtaccaggtcgactccgaattagaaggtatagcgtatatatttaaagcacgactatgctgatattgattcactgtgattatttttaccaccttaccaccttaccacctttaccaccttcaccaccttcactatcgctaagtcctgaataggaaccactcttaggtatagattggcttctatctcatatacactgaacctagaattttaatattaaaatgtgtcccagagtctagttagagaaataggtggtcttgaaatggagtatcggcctgatctagtaagattaatcctagataaatattgcgaggtattttattaatgagttattaacttaagtatcatttgaaaaatacgagaatttagctgtcctaggtatgagcttcgctcttttttccagggaatctaccacttattgcgagggaagagtagtcgaacctacagtatgcctatagagataacggaggataaagtagtgtataataaagaccctaattaaagcaacactacctctaaaaacgctgctaagtataagtactgtgccctgctttgaaagccttgccgatagattactactatagagtactatattatgccatttataatctgaggtttttgtggctgatattggtctagaaatcgacgaattagtttaagaggtagccgccgttcctgttaacgtccttaataaggtttagcttctatcgttaggagtcagagataagtgatacctagtcgtcctagtgatacaactagcagcgtcagactactctgtgctagaagctccgtcgcttttagacatcctgctctatccggtttctctgatcttagaagcttcagtatgtatttagctagttgaatgatatagggactctacgaaaggtcccgacgagtccttagagtgcggtatttctaaactagcctatatttgagaggtacaattgaatgtaaacggcgaaaaggtagctcttatggttacgttctgaagtaagtcggtagttttattctttaaattcttaatcggaaagagactatggttattagacccggtactagtatatgatcctcttatggtaccgcttatagaatcttttttggtaattactctattgtacttgggttccgtcataggcttattactagggacgctaactggagaactggagtgtaatagtaaatcacaatataatggtcgatttaaggccgataaagggaattgctttaagactagtataatgtaaagccttgatcccttattatatagtgcctggcttatctgtaaaccaatagtttgagtatacgttggctttagtgaagctaacgtcggctataagttaatcattatcagctatggtgtttaaaggtaatatatcgtctctgaaggttgggaaagtatgagaaaaacctggaaagaggtatatatgatatatacgactgctaagcgatagctatgactttctatggcaagctgctttatagactgattatatattgatcaagtataggaagactagactgtgctaataagataaggtggactgttcaatatattaggtctctagcaatcgccgatataattctaagtttcgaaggctagggattgtggcaatataaaaggtatatagactattataagagttagttatgtctggtgctggccttagaaaatgtcaattctgtatgttaatacctagctgtatatttttattcgctagactataatataagtcgtagtagtaaatatcgtttaaagttcctataaatggtgactatcgttaaagtaatagattggacgattaagctatcgcagttgtccgatataaataagtatatctaccggctaaggtaaactactagttctattatagcaaattagtggacaatagcgcctcccctaagccgtgtcaagtaagagcaactccgtaagcgtcgcaataatctactacaatgccacaatgaattttagcttctgtatgggatgaaaagctggcttattatagaactacctgatggtcagatttttatatactactcctatctagatacccctctgcccttaagggaagatatggtaagacaaagattaatatgagtattcagtgatttggtgctgattagtgaaagaaaacacggcctaagcccactattattcgaacgccttgcaactatatttctgcgacctctgcttagttagttggtagagatatcccggtcttctgtgccccagttcgtcaaacctagaaatgggaagctctggcgaatcatttgaataataatcgttgtatggtctcgtagtaatataaaccgtttcgtgtttagttagttcaccttggtgcacagtaggatccgtggcgcacgtcaagaaataccgatctcaatacggtggttaaagtaatggaacctgttcaatataaaagccggactatgacatttcactatatacaacagggagaatcgagaccaatgtcaccattttatttctttgattgtttcttaaactctaagtctagtcacgctaggcctaatgtagttagtcgaatataatctggtcatcgcccttttcctattcgacagcccgaattggtttaggccagaagtagattggaatgggtctggccaatacttggcgacgacctaaagaggacagtaggaaggctagttaggagcggataagtaaatttcagttggttgtagtacttgtcttgtttcctacggccatattgagagcagatcataattctagtaaacttgagaagtttcagtattgagaggctctattcggtatatgtaaaggcctaacctatctatgggctgtgatcggctggttatggccaccgattgatattgacctcaacttgcgctcttcttattgagtctgccaaccaggggatcgagcgagggataatggctcatcttctacgccacattgtaaccgtcaccctgtgtccagttccccgatgctatctccgcctaacgtgtatccggcgatgtcggtggagtcgaccgtgtttcgcgcttggattaagagaaactgtaacatgacataagtactgtaaacggaacgcttcaaaaggggttataatacttactgattgggtcactagaaaggcgatggcttcgccttacgctgtgagtgggtagcgagccaggtgtctgtgttgcagagaattgttagcgcaagtctttgtgatatcgtaatatatgggcagtgtgtactaccggctctggtgggaatatgattgcctttaatggcctggaagcctggtggattattagcatatctcggactcggacgtcgaaagaaagagtcataccactggaatggtaaccagtaggacgcccagaatgaagaccccgagtgcgattatctgtaatattttttagaaacgctatatgtatcgcgaaggggaatgagggaaagagttcgatgttatatacctgacttttgtaggtagtcttgcaatataaattgtggttttggggatatatataacatgagggagagagttaccgacccctgttgaagtcacaatctaaactcgttggcccgtagcaatttgatgctatcgcctactcagaaatatgaggaatttttgaattcattctacccacttaaacggtaccccaaccttagtcaaccaggttctcacatttagcaatgatatatatttaggggaattcagcagcttatatgttacgtatcgcttcattagtttagattattatttataaaaccactaaagggctaaaatttataaattaatcacctctatggtcccgaaagttttgctatatgagggtatgtttgttaccgaatttgataaccggcgtgcttactaattagctaaccacttcggataggggcgatggaaagtataatctcgctacccggattttcggctcgctactttctattttgcgcttaatactagatcctgcagtttatatagcgataactcgaaacctatgccttctgcttcctttagcgttagcttctatcggagtctctcgcagccggatagacttacctagaggccttaagagttgcacaaattctttcgtctcttagaagtctataaaggaaaagttaaggacgaatgttttcagttgacctggagcacgttgacaggatggcgtcgcgtgattagtagcattcgctacgcagctgtataccgcattccatacgatcggaaaatattccttaagatggttcgcgcggccatcaaattttcgaaatgtatcgctagcttcgaaagctctaaaagactttatcgcatttaaaagttcgtgaagatatcgctttcagggttcgactagctgatagcccagctaaaacacaatgcccgcttataaatttctttgggtgaagcctaccgcgatcatttagcctggcggttggttttgcttctggaagctgttaggagagtgcttcagagcattgaagacggcttcgtctctaaagtgaaatagtttttacacgcggagttcaaaagtacttaggggtcgtccgcgtatcctacctataacgccaagcgtatggcgaactgcaccgtctcgtaaaaagagtagggatataaagaatgaattctgaaattgctcctatactttcaagttccgtgaaaatgcttaagccatagatctaattctgtctaggtgttaggtcactccgtccactttcattccgaacccaccttatccgcttgtctttagttatctgtcttgacaggagttaaagcaacacaaagctctggaagtgttaaagctatcgaagcgaagactgcctaacaggagagaccttccactgctgcttccactcctgttctgtactggtttcctcggctcgcgatttgttaagagctactcttaatgaaacgatagctcgaatcaagcgcgggtccccagaagggctgtttgcccggttgaaatgatactgtaaagccagactttgagttgcgtctattgtggtgctgataagttggtggaagctctcaaaatacttgcaataaaagtcgttcttaagtccctgttgacggtgctgctgtatcctttcggtcttcaattcggccattgacatttcgggttgtgttttggatttcctcagttgtggccgggtggtttccaaggccatggtagatccgctcgctatagagatttggtggtctagtaaatttatcttaggaagagatggcttgatttgtagggtagttggtatggtagtaatagggatagtatctttggctgtgtctgtggatcgactgtagatgcttgaagtgttgtcgcgagagtaaccgggagttcgatgttggaaagggtttatatcggtcatggactgtctacgtctcggctctctgaaaccgatgtatatagggaacgggagttactagcgttttaagaatggaaagtctatttcatggacaacgcagtcaatttgtgctctaagattgtttctaaacggcttccctcacattctcaccaccgttgacgaactgcgcactcttagccgtagaccagtaccagtatagtactaagctagtctgtaggaattttaccaatgttcctaggcgctaagtgtattgctatactaaggggtggtattatagagacgttatatggttctttgatagcgagcgaacttttgtcttcgccctgccacctactcgcgcttttagatttcaactaacgagggcgaccataatacgtatctacgggttataaggtatagatagattatatcctgcagttcgaattcagactcctatctagaataattgtatgattctaattgttgctattattactagagtaaacctagtctccgtgcgtcttgtatttcatcggggtgacccgtcgagacctaattacattttgtattctacttattaaccggcttaaacgttaaactatagttttacccagcttataaccgccgccgtttctaccctaaagcaggctctaggaagtgaactagtcgctttgacctgcgatagtagtaataggatctctgcggcggctattcttgatctcgatgatctgtgcgaccgaactaggcgtaaaccttttgcttattgaggaattcctacgctgatttagggaaaccactaatcctttcgcgaaaggtattattggcaatttcaattgtgaccatttcgttaaggctggtgacccaaaaattaatacgcttcctaaagtatctataaaaccggtaaatgtcgactagatctatgcttcctaaattaagatcctgaccagacttaaatctggcaccagggaactcgataagtacctgctacaagatctcggtaggatttggtcttgaataaagaacagatccccgataatgaaatgaagccttaccctggatgggagttttatccaacttaaagaaaaatattaccaacgcgagaatggtccttataagctcagctggaactgtaaaatctatatccaacattgcttctagcgagtatatattatctaatctagggagcgtcctatcgattacctggtctagtcggaaaatattaggtgttaatagatagggtaggtaattcagagcttctaaaaacccttgctttctatctatagatagagagtatattatggcctagaacagttggggaagaggcccctcctagattcgacctagtatacccgttggacgactggggggagatatggagaagcctgttccgatagagaggagaaggtcgtgtcgtttcgccataggccagataatgctcgactctcgcaaagtaataccgagtagggtgttcgtatagaccctactgtcttacagataaaggcctggcaactcttttagttagaagtagctagaaaatgtcagtatattgaaatgtcttatggtgcttggacttatatgggcgctgcaccactgtatatcgatctgttaaaagctaactgttagtaaggttgactaccactatccaaatcaactggctgcaaatggtcacttacgcgttaagtaaggaagggtcttgtcggttgttatatagagttagaaactcgtaggcggtattggtagaacgtggacttattcctcggtaattggctagtatgtaggctttactattagatatacagcttactataatggcgatccggcaacctgtaggattagcggtagcgatatcgaatatacaacaagataggttaacggctgcttttaaaatcttcgatagaccttcggaattataaaaactatctgtggtcaagttgaacgctaaggtaaactaccggatatagtgaggaattggggtttcagacgaataacaaaaaatgttacgcgctaggtacaggaacgcatcgaaatattgtatgaccgaagattgattgagaaaaatgtcaattgccgttaatacacctagaggaggtttcttagtatattaaccacaataaaagactcggctactcggtatatgtacctatactggttccaatacacaggtctggtaaagatgcgatcagaatgccaatacgactttctaaagcctgtagaaggcccagttggattagaccgcgcactctactaccatctaaagtgagaatcacagggggcttcgttagaggcagttagcgaacggtgatatccgacctctcttcgcagatgggacattgagtaacctcgaaatggtactccctaagacaacttggctttccgaagatcacgatataagtgtcatatattgcatgtttatacgggagtatatgctctaggggtcgactcagacagactaaataagtagtggtagagcgaagcctaccctaccggcgatataagcgatataacgtctcttttcgaatggctgccgatatctttactgtgcttaattgtataaagtagtgtacgaagtaggatgaaacgctagcaatatggtatttgaactcattgtcctaaatacttaggtatcgcttcttataaagtacagcgaataccacggtaggcgagaatcctggacaggttagcttcttaattaggttcaggagagtataagttaagaaatatggttataccatacatttgagggggataggcgtctattaagaaggccgaggctataaggttatcaaagtcctcctttaagtagctaatggatgtttacgtaacctcttgaaggtaattgtctattgatttgttttttatatagtcccttcgggctcttactaaaagattaaatggtactgtatgtaggagccttttgtggctttgtacgctagtgctctagaaagcgcttagatgagacgctgagaagcgtcgataattagaaattcgctcggtctggactatattgagttacttaacgattaatgtttacagtggctggaaaacgacactatctgaaagcccgtgacgtggatgtaggtctagaatcgtgactgtcctagtattgagcttttggagctgagtgtattcctgtgcgaaggcttctattatatgttgactgttggttaagacgatgactacctgtaggggagcgggaataaccttattactaattgtaagctgtcgacgtggtctctgtaataagtttattgcggcttggatgttagggatagaatcgaggaataaatataggatctaggtctatggtaaaatgagttacctcttgacctcttgctgtagccttgtaggggtcaacatcccgtctgtgccccctagtgagaaggtttgatgctttgtcgttgaattctttagctacttggaatcctctaacctttattcgagatatagaccgcttttagtaaataatataggattctgtgtatgggtggtcttggtgctgagatagagatggattaagcctacggggcctttctgtgtaatgttgttataggggaatagagcccgcaaggctttattgcagtttgaatttccgtaaaagtagagtagggatggatattgatattttggattgggtaattcctatactagttgttttaggcggttggtattaactaaatcctaagctttattctctttgacaaggtcaagctaggcagctattagagagattgagagattgagagattaagagattggtaaaagaatgggcctattgggaaccttatatacaggctcttatctaaaagggacaggcagtggcttaatagtggtcgacgcttaggttgaagttggcataatcttgtcttgccttaaaatcccctctgaactaaaaatatgtcaagtaccagaccagtgtattcgtagatgacgctcgcttaaactaattatgcagcaactttcacggtttatcagacggcattcttttttgatatcggaaactagaccacataagtctcaccgtaagataaaaatgtgtcttcccctatactaggacccctagacctagttagagcacgtatcatagtggcctttcatatggactatttaaagagctggtacggttctttgttgatttgcctccttacggtaaccttaaaactttttggttatggccttcggtgtggacaattatataagcacgctagcgaaaacgggattggaaaagactctacttcgcgaaattaaccctgtgcttgttctgtcttactcagctgcggatgtagccccagtgctgtgtagagttaaccagatataccacgccgatgaaacttcctatatcagaatgcttagagaagaagtagaaatggatatacattttagtatcagttggcgcggctaactgggcattgctggccggctatctagttattcccggtacattcacttcgctacagaccttaaactaggttgaaaagacattgtaagccaacgaggccggttatatagttctatatatgatccagaaccccctgttactcgctattgtgtgcttactttttgctagtggaattgcggctcttatgtggctgatgtatttcctaaatcttagggggaactacccctggctaattaacaaagtttttttgtaagtgaacaagtcctaactgaaagaggtatgaaaagccagatctaactctaatcctggactagacccctatgcctatatgctgctactgggctgctgactactgttatcaatgtttgtatatcttaaggtggggattggtcggtgatggctattataataactgctgttactagagtaactcttctgagctgtttagcacttcttgcgctttataagttctataagctagagcgaatcagaaaagaagatgaggatattcgacgttctcgagtatccaccactcttaataggtgatattagagttttcagaccggagaagagcctggttagaagtatcaccgttatatcgagactggtatttcccatcttttcctttttgattctacccctcattctggtactgcggaagcctttttgcttctagagtttagttgtgagctcttataaggggcctaaatgtggatcttggcgcgcgcccgatagtgctctcgtctatccctgtctcacagtatcacttcttgttcagttttccgatttccatccaatattcatcatgtatacctattatctaatgaaattggtcctagcccagaaaaatagcatgttcaattgtaaaagagattttcgtacggaagccctcggtggtcagtagattgaagatcgcctaaatggcgctctaaatcgatagaatggttagactgattgctgataggccgatagatagcatgcttttatttaaattgatacttctcattctgccaaatatacttcatctttccaaataaaagaaattgaacgattaccctgtagatagtaaatatatactgtttgtttatgtacatcgaaagaacctttcctttggtttttgctggcatgttgattgttaaatcctactcttatttcctgcgagtctatctcatcttctagtaaaaatcatcaaattttggaaatggctatctttcccacctgatgttggatgttgttagcaaacaagcttatagacagggtaagtttcgagaaatttaatatctcaagttttggtctatcgatttcccagatcaatatgctgtgattccccgaaatgtcaaagaaactgtttaacatgacagccatagggagctacgtatgcatatgacatacggtgatagaagttgtgctaatagaccgagcccttaagtcatgctgttaattgagggtaataagatttagttcaattagctatgttgagaaaggttggctagtcaaacctgttacgtaaccatttatactattacgtatgatccggataccgttgaagctatttattaagtaacgttgatattttgggtagttggtgatcctagtgccagtatgatttatttaaaggctaaggtataagtgaaatatgagagagtataaatattaggctaaccgcctttatgagcccccctttctactaaaatacctgagtcctatccttagacagataacctaaaacgcgctactcttaggaattagcctgttttgctagtatatacggtaggaagcccctactccgcaaaccctattccctggtaatatctctaatagactgagctagatatagctaggagttaagtatcttccgatagtgggattaaatctaacctaggctaaatgatatgtctactaaagtcctaacgactactgtgatgccggaaacagtgccttatgtataaaaccagtacgtagattaactaatattaccgacattgctatatttataggttaatattttcaagtactgagagttttttatgtgatataattacgagctaccctactgttgacctatgtgtcggagacgaaatggcgtctacttaaagtatgaagataacctaaacgccctcttggaataacgccgccttacccttagctttgataattctaatattcacgctgccaactgggagtatggtagaggctattataacagcttatattcctacccctatacgaatcgggcctactataccggttgaagggtctggaaatgtggtatggttatcgaccactcgatggctgactttatgctatctactcctcctagttgttaaaataattgatgaacgtcgatttatttaatttgcttaatatcctccatggaggagtagaatagggctagcttacgatatctgtctctatctaggaataactttatcccctgttatccttttctgtagtaagactgaggcaaaaaggaaaataaaatgttggatattcaaggggaacagtatctgaacatattggaagtaggcctattaaaatagactgaaaattataggctattttatgatactgagtaactgtacctcaactttctatattttaattgacggtaatagaaatcccaattaatagaggtttactgtaacctactataattgcggtaatttactactatacttaaagatctaatgtcgttatattgttactaatagactgacattgcgaagacgaaggttatgtgttaaaataagatcttagagctataaatggttctttgacccttgtccatccttgctatattttttcacgccgcgaagctaatatagcattataaatcgcgctaagactaaatacagccgaccttctaccgtgtggcttaataagtcggccttctgtaataagcagctgagtctaaacttaacggcgtctctgtatatcctaccccctacaattcagaaaacggctaccgcggtaatcatacctagttcaataaagccacacctaggtcgcctaaacgcaagcattctataagtgaattaaaacctataggatacttttgaacctgatactggattatcctaagatcggtctctgatatttacccgaaataagtcggaaaaagggaagttggtatatatctaataacttgaaaaacagttctctcccgctatatatttcctagagctgatggaacaagtcggctatctaagcttcctaaaattgctcgaatgttactattataatgctttatgtatattgatttaggaactaacggaagtgtcagttagccatattctagcctctagctgctcgattactaccgataaactcgttggaattattaagccggtaagccaataaaatctcttataggtacattcgaaattaacttggaataggtattagaaggaatctaatatctacgtgggctcaggcgagcactcgctaccctaggcccggaaataatcctacttacgcagtctggtgatattaagattagtgaggtatccgcagatattgcgaaaattgataaaaactgacttttaatagtaggcgtcgagaatagctgcgaaattaaagaatcggaaataaatcctgtgacaatgaaattatgcgctctagccgatattatcacgaaattgatgttgaaaaatcgtatatacgagtaggaagcggagatttagaacttaccttactagctggaaagtatctctgtcgaagaaatcttgcaggtaagtttatgctgtcttatcatattctcggctaatatgatagaacgagatgtttacccgagatttatacgaggaagagttgaaattgttagtcagtgtagctaacaagactgcctatcacagtatcaaatcttactatgctcgttactgaaggacaaacttattagcttttgctcggctgttttttgaggcctaccaaatcgagaaggaacccgcgatcctattttctatctgtgctgttcggacaatatattattggtgtataaggaaagctaggtacggtagattggtagatggagcatggttccgacggtggtagtttgcaaacgctctttaagcgaacaaatatagtaggttcaggatagccccgactacacttaatttgcgacctgttattataatcagttcttacttatatgacccatcggtattatcaatttatttgtatatttttgcattcgtttatcgcctacttaactagggtctatgtaacacaaggagtgcgttgcttctgtttggatttgagacataatcatacccgctgggcaaaatactatcattatctcgcagatgtgctccccgctggaactataatactgaaaccaggtttgtaatcaacaaagagaggtgaatattattagactggaattttccacttcacagacgatctggattgagctagatgggtctgaacgctcccgtctatatatctcagcgatgcaggacccattgctcatcaggatctttatacaagtttagctaccctggcagccatacgaacaaggcatcgagttggcattttcagtggtggaattagcctcgccggtgtcggctgtatcggtgatgggaattgggccaaatgtaggatttccggtgcataccggttcgccttcttgcggtcgatatttgctgtcgccattatattcaacaatacttccaggccaagggaagtgaatgtctacattttctctggtaatacagccattcacactgcctcccatcaagatttccgggtccttttacagggcatcccccttcgtaggacttgataactttccattccgaattctttatcggctcgcgatcactagtgaggctcacctggcaggacctactgccataggtggcactgcccagaagcttgatggaattattgctcctagtccgataagtcgcctcttcagtcagaacgataaagtcacctagggatatcttataaggaaagtcactaccatctatagcaagtagcgagttgttaagtgtctttctactagatccgtaggattcgggagaggtcattctcaggtacatataggtcagcgaaaatacaactgcctgtaaaagtagacactatatcatccgaattctttgtcggctcacgatcactggtgaggctcacctggcaggacccaccgccatgggtggcgctgcctagaagcttgatggaattattgctcccagtccgataagtcgcctcttcagtcggaacgataaagttacctggggatatcttgtaaggaaagtcactaccatctgcagcaagtggcgagttgtcaagtgtctttctactagatccgtagggttcgggagaggtcattctcaggtgcgcataggtcggcgaaaatgcaactgcctacaaaagtagacactatgtcacgagtattatagtaaaaggggagatggcctcctgtgatcaaataccggttagttatcatatagctgaaggttatactaggtttcgctgccgcttatatatctccgaagtatatataaatgcaaggacgcttgaactattaaggctgctgcggttatataagtctatcacaaaaccatagtgtagcctagttatactgttcttttagcttaaagtgcgctgtagtaggtagaaatttggctttcaagacaagactaatatgattctaccgattaaccggaataagtggtgagcctataattgtgataaaatgtccttatatctgaatagaaaatagagttccccgtttaagtaagtcgggtcgacttactactccttatacaatctggcacgaatttaacgatagacttaactaaccaacattccctataaagactaatactgctaatattctgtccctatattgaatttcccctattataaaagtacggcgctcgctatggaccactatttatgtcttaagtcactacaaataaactcgaatcctagaattacccgcttaattcctccttgattttatcctcctacttcttgtccgctctcagttagagttagcaaagaatctcaatatggatgttcaacctaaacttaaaactaaaccagccgatgtagcgaatcaaaaagcatgtaggagaagaaagtctctttttaaaaaggcctctgagtatagctcggaatacgatgccgatatctaccttattcttcggatgaagaaatctaggaagatcttcgttctggtcttaaatataaaagattggcctctttcctaatattaattagtaagttctctgtattatcgatctcattgttagaaaggtactaaattgatttctagaagtactattatcctatacctattcaaatgtctctaagcgacctagagtctaagctatgaatctctatcttctatactagtaataagtattaccctcaattaggtacccttatagggttatcctgattgttcagctaagccctttacagcttatatcccttataaagtcattcccccctatcacttatatataggattaacctccgagggcttccgttgtatcctatgaattataatatctgcgctacgccccgaagattggtcagagtcgattaaccttattatttatgtctattataaatgctgcggaaatgtattataaacttagttgattacgttaaaggatataaagatttacttccactaaagggactaacgatgaatttattatccgaaatgtaaattctttaggaattagaggtaaataaaactctattacagtttaagatttgcactcgcctagttagataataattgccttgctttatgctaagccttcccttagcttctatgattattctaagtataaattttaatatagggcctggttacttaattaggtttacctctagtggcctaaaaccgaaaggcatcttggtaaatattgttggataacgaatttgcgtctagatagtacgagacttgtttgatgatatatcccttatatactctattactgatctgtatatgtatttcctattctattctatcctatgagtggcctatcgcgccgaccgacattaacgacattcgcttaataagcgaagaatagcatcctcttaggcatgatatcaatcataccgtctaaaaagtcttagaatcaagcgccttagtaaggatatcgctacctactaaccagtaaggttatatggaattatgcctatctaggataaaggtataagatccctgtactgctattaatgagccgaaataaacgagtagtactcccttatggaatgcttagacattaaactttggcgagaattgcgataggctcaattctagtgtaggcagggtttctgaggagctacccggaagggtgtttaagtggccctctgatagtattaccgaagaataaatgtctctagggggtatcatattcttactcgatgtctcgcctagcgttttatcgtatctatagatgctgcttagttgtaacgaacgtggtatatcggtttgggttgctctagattgcaagcttatatctggtgcgataactggttataaagaggccatgctaaaaatattcttatcgtttgatcgacggctgtcctcgggtctatactagtagatataggggttcgtacttgttagtaaccagagacggttgagtatagagaattctaacttcagcttgacgctgtataccactgtcttaaagcttacttgaatgtagtgtagcttatactccgcgaggagtagtaagacgtttaggattataacgaggatattgatataaaatagatggataatagcgttgcggccgtcgcgaccgcggattataatggtactcttgaaatgatataccgctttatatatatatatataccacagataacgaagtcttatatacaaaaaactgtcgattagatccagtcaaatatcgcggtaggacgagtaaagcatatatcgctgcggttgaggccgaagaaaaaaacggttattggtatatataggatacaagcgtttgtaatgatcatctatagaacccactgtacctttcttatgtcggagaaaatgaggtgtagacgcgagtagaggacgatagcttagccggtaactatggtgtaccatcctattataaaggggatggacgtcgggaggttagacgcctgagaaataaagcgagctatagtaggaatggtatatacgagaattccctaggatgcaaattgtatactctagaaatagaggccctggtagcgcttaaatgagtcgaacgtgataatcgctgtttctagggcattgtacgcgccgatagagaatatagatacgatctagatgatagagatgttctctatgagaatggccccaatatttggtagtaggctggttatgagtgtatctatggtctaataaggcttaacaggtataaagagggctagaagtatagaggataaacgattaacagcttggtttataaaagcctctcaaaccgaaaactgcccttgcaataagatcatgacatcgtagctagggggctccttagaagctctaaaaatgtctagactcttatcggcttagggggaatatgcttggttggattgctagtggtctgaatgggtctaacgggtaagttagctatatcgaaactagagtaatttgtagttgagactgaggtatacaattgatttttaatctatgccacagttatttttgacgtgaaggaaagctttcccactattcctaagttatagggctagtttcacgacgactgcaaaaccgagggcgggatcgtcggcctatggctaatcgccttatcttgaatcttgataaatgatttccgatgaaccatggaaacgctggttcggggagaaaatgggattatctgtggataaataggatttagtttcgatgttatcggaaaccttactaataaactttctgctctacctgctttctaggtcggccgtggttgaagttgtccctacagtcataggagaatctagaagaatcgggtatgcttaccacgggcgtagtcttttgaaatattatgaggtagcactactgtattcaaaatattctcgatctctagagtctgaggacgggtagaatgagccggatgctggaaaaggagtgggaccgcagatggtcggcccacaccgctgactctttgccatttccgtcagccaatcggtttctcggctttttaggcaaaacctaaaaaaatatgcttatgtaatcccagctgatccgttcaaatccgttgaatgtttataagctgtctgctagggttataagaactggcgatcgaatctgagtagatagaaagcgcagatttcagttttaaagggagtatacttattagggaagctagtataggagaagatatataccttcttgaatatccttcaaaggacgagactaacgagaaccaacaggtcggcactcgacgaggactaagttattttcttgtgagagcaggtaggagaacccgaccatggattgctttcagcgtaccattcttttgctgggtacctgcgtgatattccaaatacctcaactgccgtacctgtgagggtggtcccttcagcaggaccaagcaataaaggtatgttgcataattactggcctgtcgagactaggcttgtggatcgtgtctggacttttttgaaaaactttgctatttcttctctcgactataaatagaacctgcttgatctattgtcccgtgggtcatcgacgagttttctatcacaggaccgtaccagcgtcggtccatattcacacgcggtgtttgattggccctacaagtgcttcctttcagctaatgagccttgatagctgaaatgcctcaaatggttgccctggaaactaagcccaggttcctgttatggctttttcgacacgatctaaagtctcatagtcagttatggaaccatggtgagctttgaggaatgtagcacgagtggcaacggttggtgcaacttggatcccaaatcctagttctataaaacaaagccctatacatgtccttagttgatttctggattgttttcttctctgaatgaaatggatgtctttatggcctaactttcggaaactgttgtaatagtgggaccgtgtaaatagtggaagttacatctaggacaatagtacaactacaccacatatggctgaggccagagagcccttcttgtttctaagagcggctcggatggttcggctctggtcgatactgaggcacaaccgtatacctcaacatagatcccggtgcgcggcggtcgatcactttctctacaataaaaccgcagatcttgtgcttttgcgctagcgtaccgtggggcccctgtgtgtcaatgggtacttgactttcaggcttatgatgctgataccgatacagctgcttggcaggggggaggtcacgcgtttaccttgtttcagggcttttgattgtctccccctaaacttttaaagtcgagactccctgaaggccactgcgatcaatcatttcttcgctttgcctagtgtctttctaaacctgcaatcactcaccagacggaaggattcagtatggcaaaggaccaaaagccttcccggcgcggtgtagaccgcggtattgctacaatgaagctcggtactggtaggtcatgtgcctcttcgctatgttctgctcggtcgactgtctctaggtctaaggcggtaggcaagctgtacaaagggctggtaggtcaatctctgtttcccatttcctcgctcgagccttgttgtaaccttgtgctttatcttatcagtaccttaatgagccatcttgctgacgttagcttttagggacattctatagcgaaacgcgcccgaaagaaaaatgatgaagtaacctatcaaaagtgtttagctatgatggacgaggtataagaggagtgccagttagcccttgaagagatagataaagagagagcctatgactcccagtcgatgtagcgtctgtatgctgaaaaggcctaggagatatcgaaactgtaggaggctatcacagtaaaaggtaaagccttagctgagaaccagaggcttgaaagagagctctgtcaattgtagtaggcgaaggagttattgtacgccacaatgtagggcctggtcttatggcacgatattcagcctgtcttgtattaaatatatggcgagctggtatcggcgactactcggttctggaatacgatcgatgccctttagaaccataggttggtatcttacttgcctagctccggagggatccatggaaattggcctgagtaggatgggccgcttggcactctaggtcacaatgccctacctgggttttccgcttcgagtgattatccgcttgtaacttaagaggcgccagttctaatcaactaatattaatcacttgtgtgaaatatggtaaattcagcgtttccggcggtcctggctttactatggaggaaccggctagtcggtttatatagccactacgtaggtagatagctcatgagattatctttagtaataccacagccattctatcataatagtaaaaatgaaaaataaatggttgttgtccgatgttctgctgtggaaagaatattgatgtaaatactttgacgattagactcgctccgccaagcgtagcttagaaggtagagagaatgttctatggtcgctgaatgtggttagcggtagggcctacagcctggggagatgatgcgctgatctgtcggaagcaaccgaatctgactgatcatgaccgtggtccctacccagtatttgataggcaatatgactcggcgacattcatgaagaaatttggctgtttccttggtgcttggttcacatatgcttttcttgccacttggtagataataggattttaaacgatagcctacgacgctggcacgaactatagtatttttctggtccgcccacagtggccgaaactcaattgagtaggctacccgtgggtcatgagatttggaatactctactaagcgtacgacagctaatctatatctcaaattgatctactactgaatgtggacgtgagggtccagtgggctagggagagggtagtcgataaaatgatacctaggcgcttgagaaaccttaatggtatgaatcagtttataactgttactggcgaggccagagaattcgtcctaaggaattcagtttattataccggaattatagtaaatatttgtctactttctgtagccttacggttagttatagcttctagtctgccctagtgagatatgattggtcgcgaagtacaatgcgatggtgataccttagctaataaggctgataacaggctctccgatatattctacaactatattatatttcgatctagatcactgctgcgaccgaagggttcgcctagttgtattatcctctgtagtactgttcttcccctctttagctattatctctatagctgtctctacgactgccaaccgactgcggatgtcctccaagtcactgcgaatagttgtaatccagctgttagagttatccaatgctttttgtatgagcctgggaaaagtcagcctttgttcgttctctgatgtattgtataactaacttcgttcggatatctaggctgattgttgtaagtagatgtattacaaaatattattataggggggtaaattcgcactcactctgcggtacattgtaaggcgattatattgcagtcctccgcgagattagcctatccgggttgttctagttcttcttctggtcgcgggcctatactctaggtgtatggaggactttcctggccatcctctactacgatgtcgttgtggtggttgccaaagaagccattctcctgtaaagaagactcttcctcagtggtattaccttccgctgaccctggcggactctagatattctcggacccggaggatgacagggatagtgcacgttgtaatcggctccgaaagctttgtcgttgattagtgaacggaatctttcgaatccttcctatagttggatctgtgttaaggtaagataatgagttctcctagctagatgttataggagaagttgtataagctgatatgaagagttagttctctaaaccggaacttataatcggggtgtgctaggccactatgttatatccgtacttacagcaaatttcgcttggtttggaatacattcagctaattagtcacgatttttattaaactttaggggaatgaactttgtaggaaggcaagttttgcctctaaagtctgtttgaggttacattattcagtacccggtggggcttggtctgggaactcattgctgtgttcttttgatgtacagtaattgtatttaagaataatttctaggagtatgaaattgacagttaggcgttcttatagctagggattgttttaatacagatggcttgggggagcctgaaatacgaagtcaataattcggaattcagacttactgaaccgattccctagaatgatctatgggttatgttattgagactttagaagaatttttgtgaaccaggggtactatcttaactttttacttggatctggagaggatttatgctcacttttcccctctattaggagcttaagtcgtgctattgtccgaaaaggtcgttctggttactgttagttcatgcgatatgtccccttgaagcgaggtggcctgggtggaatgggaggaaaagaaccttctctcctggctggacgcttatcgggcgctgccgtggaaagcccgctcctatgtatattctgaacaatattagatggaccgaagcgctgagtctctgcgaggaaaaaagtactatattctgcgtaagcaacgtcgtattagtgcagaccgcttgagtatccaggctatctaagccatctaagccgagcaggagcttatcgctcggccggccataaggctttattagcgaatcttataagcagaaggcctgcgcaaagtaatattgaaaaatggtttcaaacaatcctaactactgagactagctagatcgatagtattgaattaataaagaggaaaggttcgagactaggtacgaactaatgtttactaccctttgaccataagctaattatatatcacaggccgcgcgataccattactctgccctttacggtgtgaagaaacacgatcgtcgacgtagatttggaactatgtatattgtgtctgtgtagctaggaagctgagataccgatgagcggaatatccacgctactagcagttcgttggtatctgcgctatatcgcgatctcgaagtagtaatagtaaatatctcgatgaattagtgctgttggatgttgctacgaacggggaaaatggcaaatatggcagctgagcaatcaagctactgtatgattgttgtatgtacgaatacacatattatcaaaatataaataagcaccattccttggaattacgataatagcgagggagtaccaaggttatagtttgataaaagttagttccctagagatcgtagaatatggccgggattgtcgatcgatcgccgaacctggaaaataaagttcgataagccatggaaatgctccctcggtgagaggatgcgggaggatgcggctgtcccgaatgatccttatggaaagcttatctaaacagcctctgctatacttgctttgtagattgctagcctaaaaaaaaagagatccggagcaggaccaacaaattcttatgctgctcatatataggatattaggaaaggaatattttattagaagatactgcattcagcgtcattctcgagatgggtagggtgcttggaatacaggttaggtgccgcaggtgggccggcccacagaacccactcctgggagccactcggttttcgggtttagttcaaaaaccggagatatttacgtaagctcatgtgatccactggcattctttctagttataagccatctgctagagttactagactggcgatagaattgagtatatggagaggaattgtctggctcgaagagagtatagtataatcattaggggaaaacttggtgtaggagaagatacatagcttctagaacgttctacagaccagataggcaaagttctgcttcccacttgataggggtacttactttctaatgactgcgaccaagagaacataaaagaatacaaccacgggtcgggttgtagcctaccattctgtcgctaaagtctgtgtgttcttccaaatacttacctgccccagcagtacttcctaggcaataatcccccgtaccatcggacactgatggccgaaagctttgggcttgtggatcgtgtctggatctctgcaattcgttccagtttctctgcgggcgataaatagaacctccctgaatctactgtcctgtgggtcgtcgctgagatctgcatcgcagaaccctacctgcgtctgtctaaattcacgcgtggtgtttgattggccggtcgggtgcttttcgcctccagggtctcatcagtgtaatagtagcgttgcaatcttgcgaggggtggcgatcacgagaacctagttcgtgggcttggttgcatcagttcacatggttgtcctggaaactagacccagtttcttgtctgagcttttcaaaggtctagaccctttttggctattatgccaaagaaagacaatctttatcctgagtttgaaagtatgccagtgcctatgcgcccagggagtagacattttagtaaaggcaatacaagttaactgcgattagaaaggaaagaaataacattcagcggcgcgagcctagagatggtagtattgattctagtgagaccgaaaggtcctccggccaaccgcaggtacagcacagcgtttccgtggctatctccagcccattatttcggcatctgtcgaagcacttcaatccttatgaaagagacggtgactgtggttaaaacggggagatatagaatgcaagcgcgttgagcgatttaattgcaaattcggtgatgggtacgaatcttactttcgcggtattactttctcctcaacagtcgatgaaagtgggccatcagacctaacgcacaattttgagaggaataccaggtcgagacttggctctgtaggccacaaagtctccaaacacccctttaacgtcgttgaaatcgcttcaacgcttattaacgagaccgtgactctcgctaccaactgcgcgannnnnnnnnnnnnnnnnnnnnnnnnnnnnnnnnnnnnnnnnnnnnnnnnnnnnnnnnnnnnnnnnnnnnnnnnnnnnnnnnnnnnnnnnnnnnnnnnnnnnnnnnnnnnnnnnnnnnnnnnnnnnnnnnnnnnnnnnnnnnnnnnnnnnnnnnnnnnnnnnnnnnnnnnnnnnnnnnnnnnnnnnnnnnnnnnnnnnnnnnnnnnnnnnnnnnnnnnnnnnnnnnnnnnnnnnnnnnnnnnnnnnnnnnnnnnnnnnnnnnnnnnnnnnnnnnnnnnnnnnnnnnnnnnnnnnnnnnnnnnnnnnnnnnnnnnnnnnnnnnnnnnnnnnnnnnnnnnnnnnnnnnnnnnnnnnnnnnnnnnatctgcgacaaaaagtccctctagcccgtgcaggcacctcttcgtggtgctagggaccagtattagagtattcaagagtacccgaagaagcaaagacctgcgcaacatcttcatcgtctgttcattgttccgaagggtcatcattggatacatagaaggagccctagttagatcttcgtcgattcaacagccaaaatcataaactaacaaattgaagcgtcttcagtatcaaatgacgtatttcacatttttttcccttggtagcttgtgatccaataacttcctcgctacaatagaaattggcatctttcattcagatgtaggcaaacagagatgagtgttgtctaggaacgcttgttgcgttgaaccgttagcgttgatgtgagtgttgatgtgagtgttgatggtgagtgttgatgtgtgtggtgattgagcgcagaaagcgaggtgacggtaggatgacccgtcaacccgttgaagcttggccaaacgttgtcaacgctcaatttgagtgatgaccaccaaacttcgaagataaattgtgtttttttttttttttgttctattttgctcttcgttactatccgaactacccattctgcaatgctgtttgccgggtttctgaggcttccaacgaaagtggaagaggcgtctagttgagatatctctcacgccaatgggcgttcatatctggccctcaacatcgtcaggcttgatcagttttcccggccaactcgttgacattcctcctctcaaatacactaccaagcgcccgctgaaaataaaagcaaattctattcagaagctgactgcgttgattgactgatgtggggatcgtaaaactcagtctatagccgcctgcgcctacatattctataagagataccaaggctagttggaaacagtactgtccagatccttgagtttctcctgtggacaaaatggactccccaaacagctcgccagaccaggaaaagcaaggaaaacagcagcccaatgaattgccaatccataatgataaggaccataaactggaatcttcagatcatgtccctccattggtaagtaaaatccgtcagcttcgaattctttggctgaccatcgtagccctccccttcgcaacacgaagaagcaacaagacataccttggcgaccgagccgtttcaacccacgttgaaggtgctagcagacctcgaacgcaacgatcccaagtttgcctttccagctgctcgacttgttggactctaccgacgcctatgggagtcatgcgtttccaagcacatcgatgtccaaaagattgaccagagcaatgggatcttgaaggagggacggaaagctggagactgagcattttttattcctctcttatgaggacaaactaggggaatttataaccacatgctacagtaagttatcgaatgcgttgaatgtatcaacagcgtgcaccgttggcacccgtcaccaacacaacgaaagttcaccggcagtataagccttatctctccttagggaagacagaaatagatagcggaaaaacaagtgtcattattcccccccatagacgctctaccacatggacactttaccaaggctcaggctcatcgacagggtaggcttgaagatcgctcgctttaaaggctgaaacaacatcattacaaagagcctgaaccgctcgcttgcgctccgacaatactgaagcttgtatattgcagagctgtagaaggatatcgctatcgcttgctaacaagtcatttgacgcttgaagctgtcgctgctcctcctcgagtcgtattttctgggccgatttgacgacgtagcattcctataagtaaaagtacaagtcgagcaatttgagggctggtgtagcgagggagtcattgaggcttactacttttatgaactccgctataagggtacctcgtgttctcactggaacctattcagtattagtgggttttttttatttccttcctagagggggattgacctaccttaggtttaatagttgtgccgtttgaagcttattgtggttggttttccaacttgggtttatcttctggagcgtgagatactcggcactgtctcttggctggccgattaatgggggaaggcgaagtgggatggtccattttggtgaattggatcagaaattatgctcgaggggcatttatagctgataattcatgtgaggctactgttatttctactagtgcttccttacctagggtcgactgcaattttaaagctagtgaacagttagcttaaccgctgacgctcgatctcaccacctgctgagagcaaactgcttaggaataagcgggattaaatcgcatctatagtattgacacaaactaatacaaagtctatcttataatggtagtctataagtgtacttccgatgtatggatgctataaattactttcaaatcattgaagctttgctgtgactacaaactattcgaagtgcggaagtaaagataatttgattcccaatcttgatgttaataggcgctgggaacagctatctcgcaccacatcactagagctacctgaaatagatgtcgctagcccttacaaacgattaaatattctcctcggagaccgttttaacaattttttagtcgtgttgttgttataaattctgctctggatggccctctggatgcgatagtcctttactagatctagggatctcctcaaactgaagtgtatcagtctgggattggccacaagtgcatcaataatcgagaaatgtccacccctgaccgctaacatcaatggatcctcgaaccattgattccttaggttgatatcaattcggctatggcgtagtatttcccggactatctctaggtcaccgccacgggcagtaatgcagagagcagtgtcataggttgcgacagtgcttttattaacatttagacgtgcgccttgctgtactaagagccttaccacatcgagatgactatgtgaaaccgctcgataaatgggcggatctattaaaccccttctattgatctctacgccctctatactcagtaaacaagcaactgtcttcacgtgtccgtgatatacagcaacggaaattggagagtggcctgcaatgcagagattcagagcaatccctggcactgtaagcagccgttgtagaagtatagtatctaatcttattgcggtatggtgtaaagatgtagacggggactcaagtctcccacggcctctaacgaaattaatgtcgatgtctttctccgccaagagcctttcggttatctcgtcgtatgacgagtaagtagatagccaaagtggtgtattactatctttgtctttgcagttcacgttggcaagggggtggcccaggatcaaattgactatttctaagcgtttggtttgaacggcgagatggggtggcgtatagccattccggttctggatgttcgaattcaggcccttttgcctgagaagtcttttgacagcctctactgacctataggccactgcttggtgaataggtagctcagcctcttgtgatgatttggtactaagaaacactttggtcatcggatcgtttgaaaaaatcatttctatcacgggtctattgaaacgacatgcccaagaccacgccgactggcctgaatcatcttccaagttagggtcgctgctacttaaaagtagcagttgcacgaatcctattcttcctgcgaagactgctaggtgaagcgccgttcgcccgtatttgtgtttaatgtccacactggcggcgcggtgctctagcacgctcttgacgatggagaaacccccgtagtggatagcatatgacagggggctgtcgcgcgcttgattttggatgttgatatctagatctcgatggctgagcagcagttcacgcacagcagcggaagtgtatttcaacgcccgcatcaaaggagttttgcctcggtaaaatgcattgatgttggcgttatgccggagcaaagcctccccaagaccaacgttgtcgtatttgacggccaggtgcagcaggttgctgttctgaaatttgatattgtatctccagatgctgggctgcagtttaaaatcgaagtctttgcatgatttttcgagggtaaataatgcactgccgtccaaatgtgacacaatccacaacaaaagctcgttgggcagctctgtaaggttttgctgcaatgtattagctcatcggtaaaatcagcaagaaatcaaaacagaccatgaccggataggattggagctaggaagcaaatgaaatgtaaatgtggctgaggtctgaaagttggacgccttagatatctccctcagctaaattctgtggtcagctagaagtgtagcccgtcactccgctgaggcgcgtagcaaccacacggcagcatcaaagccttgacaagaatgtttgggcggcgttgaaggatctctggcgtctagctcccgggaacgccaaatcagttcctggttatgccgatagcctggagaccgaatctaccttggtacccacttctcacatctagcgccataagagtaaatcatagcacataacgcgcatcaaagttccataggcaacccagaatttcacccagcatttgtcgactttgcggctaaccgcagtagatagtctgttcgccaatacatggccatcgcgatggacagtcacaagtgcagctgattgcagcagtggtctggaatgatatcccttctcgcaggccactgattggccgtatagtggcgcatactgcgtgcgaatgcattctcggacgtaccgactgtttcaaggaagtgttccatgccagccacgtagccatataggtaaggagccacggcgatggcatataaagctggcgagggaacgctgcaagatagtccaacaccaattcccatccgaagcattttctgcctttgtccaccacctcaatgtccgccatgctgccttggaattcgcttcttgtttgtgagatggaagtcagccccaatggtggtcctggcttctgttgcaggatgacgaaaaaaaggggctccaaccaaaaactcggtcaaacgtgaagacaccaagataggccataaaaagctgaacactgtggccagagagctgtttgacctgtcaaacttgcaatcgaagctctgtgcttttgtcaaagaatctctctgtgcaaggtggcataggcaacgacaggccgatggggttggccagcagtggtatgaagcagctgtccgcaaccaggcgcgagtgtcacatgactctagagttgcatctccatccattgtgcatccgagccagcgtcagacatcgccagcctccaggcgacgccctgcatcagacaacactgaccggtcaccacctcacgggctcacacaagacccgccggggcccgtctcaaccagctccgagctggtgcaatcaatcaatcccgctgtcactgccgaaatgctgcggaccaacggtgttccatggcacgtttcgccagctcgaccagctatcctgacgtctgtcactaatatctgggcgggtgtccaagacttgacgctccagagtctcagcttgagtgaagagctcgaaaaagatccactgtgtgttttgtttggccgaggacgaggaacaagcaaacgaatgcgtgatcctgtgttgcgatcagtgccgagcgcatgcccatccatcctgcgtggaagagtggttggaaaagcgacgtacaagctttggcacgtcatgctgtgtgtggtaagtatagatggtttcaattccgtaatgctgggatgctgatgaatgctgtcgaaacgaaggaactctagacgcattgattcgtccactccgagtcctcttggcagataccgaaacaaactctgtccactcggcaagcgaatcatcaaccgatagcgagcctgtcagcgtcaggagtccagcacgaaacgacccgagtcagagtcaatcgcgtcgggggtcagtggaatccctaggggtatcaatcgagcagagtgggccccgtcgctcagccagactagcaggggctcacctaccgcgagattcttctacctctgcattgcttcgccggtcggcacgactgaattccaatcagcgtaggtgattacaatctacagaaaacgcgccacggaaatgggaaattagcgaagcagctgtcaatcacacgcgactccatatcctggtgatatggagttttggagcaagcttagcaaccaaataaattaaattccgaacttcaaaccccacggcacactacgagatcatttcatatttgcaagtgctagatgtcaatgtaccttataatgttattcgaagtctgcttcatttcaaatatgttttagctcgaaacagagtgcccgtatatactgtaaatcatcttacataccataccctagaccctagtcactctctagaaacataagcaaaacattaccgaccaagcggtcattagccggacattgactctaatatctatccaaggcatgaatggctccctttcacgatgtcttatctttgactggacttagaggatcgaagccagcatgcgaacgagagccgacaagcaccattatgatgataagtcctgtcgagatggacaagggatatggacctggctcttctagaattggtattgacaacagcccttggctgttaggactatttcacaagaccttactcattcaaactcaaagattattcctgagagcccatttggctgctttgtcataatgaggattccatgaagtaccctgcttcgcttaatcagttgataccatcaacacaatcagccagagataaagataaattataaaacaaatcaaggggaaaagccatcttatgcccaccaagccctagctatttgggacccattctcataaataatcccgttttgttgagaaagttggacttcatcaggcatagcatcgatagcgttcacaggaagtcggtctccgtccccgggattgggtctttgcctgatcgtacctgacatatttcagagggtagtccattgaagaccttccgaggatgttgcattcctaaactatgcccttccttttcagaaacgacgcgtctgggtgcccgtcgtctgtcaaggtgcgccgcttgcctttggttcgcttcaatcatttctgatagcaaaccattctgcttggccaacaccaaagtacactgctcatcagagatatttctcggcgtagaaaaagcagtaactctaggtaatgtcctactgagtcatgcaatcgaagaatgggaacccggtgtcaacatacaatgcagagactcccaaagccatgcctatgatcttttctaacagttgtagccgttgaatcaagattcgcaactctatgtcttcgaacatatcaacgtcatcaccatccagttcgtgcagggagtggttggaggagtgactggtccactctttgaagccaatctgaaatcttgcacaggcatcttggccacccaaattgtcatccgaataggatgctggacttcaagatcaagcttgcaaagaccgcccaggtcaaatgttgatgcaaaattccctagtgcattttcaacgaaaaacaattgtcgacaaagctctttcaaagcctcatttgtacgcccagtagctttcatgtcttccaaaagcgcaagaacgctgcgctgcgcagcttttgcggcctgcgcagtggaggttccggtacctgatggttcggccattgtgagcgaagaactagagcaagattagttgacgcctctcaaccggaaaaatcaagggtgggctcattctagtacaaaaggatagtgcctattcttggtgtagattattgatggcctgggaatgatgaggataatgtttgaaggaggattcaaatatatatactgtctggagtaacatcacttatctcagggcttgttagatggttcgggttcctgggaacctgggtgattatgaccgaatgattggcctaaacaacatagcttgcacgcatctggaattactctgctgggctcttaggggtaaagcattaaagtcttactggttattcgtgtccttttcgtaataatctgttcagcgcaaaagaaagatgattgctcatataagccttttgatgcatgcgcttattggcgagagaagcggttctttgccgccatatcctaacgatctttctctagtactccctattccaggacgtatcgtaaatttcttagtggactcatccaatttccctagtaccggtagtcatccgaggcctgattagcaaagtattcccaggagcaattatcatagaatggtaatgctgattgcggtaaaaagccctcaaagccgaaccaagtatggagtacatgagctaacagaaaaaaacaaaagctgctaaatatagacgccaagcctgcgaaatataccgagcagatgcataccacacgttactgcacttgtatagatggacgtctgaagatctaggccaacatagaataccattgaacttactaactgcgctattacagctctcctaagtaaaataacctgaaataactgtccgagctcttcaattgatcttgtatcgttctgttagtgctagcagttgctgtattaaagctacggagttgaccgatgcatcggagtgggtccggggattcgggagatcgacaagacaacaaaccaaaccacaaccttacgcatgcggagtacaggatccaaaaggatccatttacggtcatattattcgtcggctgtgagaaccttgtaactactatcctgctgcctagagcgtgacctaaaaattagaatcagaggcgccccctgaacgccccttttcgcggttcaaaccccggttgggttcatcacacaggtgacttccttgacttactccctctctcctacctattaccatactctgactgatccatcgaagaacacgatcaccatttcaaaatgcatcgcctccgtgactccctgctgagcccttcgccaaaaggcttccccgtcatcggcgaggcagacaccgtctcccatagtcagcaggatgtgcggcaaagtctcgctcggggtgaatttagggaggttcggggagcagccttcttcagccgaacatggatcgtcaccgacaggtactgcaatgttaaggatggggtggattccctcgaaggctacgttcgtgagatatggtatatgtactaccatctcagcctacatacgtcgcatgaaactccagaacacgatagcctggtcctcgatatcctacgaatccagggaaagggaccgttaaccagacctgtgaaaggaaattacggaatcgatatcgcacgactgaccgaaggcacgctatggaatgacctgccgttcttggttaccgacatgactgacttatggatcaacaactgcggaccaatgtcgggcacccagcgcctgaactttgcctctttcttggcaaagttagcgtcaacccgcgtctgcaaggacagaatgtgccaggtcgcccttgtcctcttccgctgtgcatttgaggagagacaagagcttcgcaccagcgaggatcaggataatgaagatcctggccggagcatgggatccctcgagcttatgcacttattgccatctgtccaggcatggttcgtcgaggcaaggtacaattttttgcaactctcagaggtctcatggaatgattgccccagcacgattggccagggtggcccctgtttcatcgagtctgatttcgggaagcgttgttcaccgactgggttcacaccatggagatggatgtactggctcaagcgactccacgagattcaggatgcggcaaaggacgctggtgagaaacgtctcaagcagtgcgccgtcgaggccatttccagaatgctcatggatgtgaaggaacgaaactctgacatcttgagggttttcaaagatgctggggatctcatatacgaagataaacatttggtatctcttaaaaggattgtggagggcgaaggcccctttttcccggagaacgaagatggcgaggagagcgaaaagacagaggggaaggaaaagctagaggaaagcaaaatgccagaggggaacaaaaaggacaactgagtctccctctctcccgctttatttctcgggtttcatagtcctcggacacaatttgctcgcctctacccctattacttatgaaatccagcgccaagtcccctcggggtttcatattaaaagcaaaagaacagacaattacacttccataattatccatcaaagcacgcatgtttaggaaattgcatttagcattggactgtgcctataatcaaagctattgtacctatgatgaaaccttatcagcgatagatgtataacgggtgtactaaggaattaaattgcgggattttggcaggtataaggaataacgaagtggctgtgtgaaacattttgagaaccccagttaatccttaccgcataacagggaatcggcccccagcattacccagaccctgatttggcagtccggctcgcaaacaagtttgaccccgcacagaagcaagagtagcgctgctgcagcagtttgatagttatccctctagcctatttctgcttacaatgtacatgtgtcgtatcatagtactccatttcacttccgactacgatcaaaagatgctggatatattcgataatctacaaccatttcgttgatgagcaacaatatctagctagatatcaaacgagtgtctttatgaaataagaaacaaaattcgccgaaaattgaagctggatagatactgggtgtatatgtatcacccaccgagcagtccttggttcgagtccttgtgggtgtagggtagtaagcttcgagaatcacagggcatctcgcatatcaccaacaagaagggaaccaaaaaccattaaatgccctggtgatcgcagagaccatctagtcacaatcgacagcgttgttgtaggtgtcgacggtacatttgttattatccttggtgcactggaaaaaagagcgagattagcacgaaatcgattcagatggctacttccgaatgattgatattctaccttcttgttatcaaacttggggcacttgataaaagtgtcctttccagcatcgttcttgtatttacattcgttcttagatttggtgcatttctgagttgtggtcccgaaccgttagtcgcgattcccaagtgagtacttaaggtatgggatattgatgtttactcactccggtgtatttggccaggacaccggcctcagccctggcatcgaggtcgtttgatacagactcaatgggggtggctaccccgcccattgcagcgaagagaaaaagggcaactgtggtgatttgcattatgaagggcttgagatgatgatcctctggagaaggttaaagtggttgaagatatcgaaatgctgtgatttgagtgatactatatggaattgagggtcatgaagccgcctttataaaccagatcatgagctctgtgtgaaaggtgacacatacaatgctcaggtccaatgcagtcatcttgggggtggcagcttatggattgcatgacttctccaatgacattaatgcctcacatacttcaggatactggacctcttggctggtatattcttacgggtggggtctctccaaaatcccttacctgcttcagcctccggggtaagatgcactacttgtttaccaggaagatatttttgggcttacctagtggtaatcatttcctaaaaagcagagaaaacggctgacacgttgacacggtgactgggccactcggatctgcaaaggacgatggctgcattgcatttgataaagttgtttcactaggaaatgatctccaaatccaaaatgttggtatatgagaaggtttagcatatggcggatgcttataggtcgaaaaggcaaaggcactatactatgtatgtatctatgtgatactgtgatacagccaagctgtaaggcagctcccggttgtgttacgtagggctggggtagattcgagccaaagcaaattaggaaatgattcgcgggtagtatttcagtaacataagctcacatggtctaggcggtcaaaagttgcatacttcaaggtgggatgggtgggcttacagcgggatgctagcccttgaacaggggttgtcctcagtggcagccccgcttctccttttgtgtaacaaagtacatagtccgatcatactgccaaggttcgctcggccgaaagagcagacagtaagcgctggaagagtaaatccaaatcttttaagatatacaggccttcctacggttgagcttaaaacatgaagtatgaggggagtggaaaaggtactttcagtcagagaagagtattgttagtggtaaagaaatttattagctttcagatagagtagctaactgatttaatatcgcactgatgaatgaacactacggtcattctcgaaatcggcttgaccattacggagtacacaccactgaacaacccttttctggccccatcgccaaggccttagtgcagatcaattattgagcaggaccgcattaaattgggggtgcagcaaaatgtgctttgcatgctaccataaaatgctacgtacattacgcacttcgtacgaaaagctctctgaattccattgacccaacgtttgatccttgcaattacgactaggggagagatgtaacatgccttgtactgggagatccgccacatatcatccgctctctgtttcaatcgcacgataggcacgcctttctttactggacaattgcacccgttatcaagcagtgctagatcttccttcacctctcctagaccacgctaccattttcaatcaggaccaaaaaagtacaaaatacaatttcttaaatactttccacatgatctccgatgtagagcttcatatcacaacaaagcaaagcgggcttattagtttcatatatagctatttttacatgtatcgatattatgcccaatttgtctacacccgccacacctatgctgccgccctcctggaaaggtagtaaaaaagatggtcgcacatttcaatctcgtgttctcttcgcaggcctgctgactagagaaaacctctctcgcgctctgaagcctgctgattgggaagtcctgagtaggtatgacgcgcttcacgataacacgtctcttgacggagtgcctcagatcgggggtcagcgctgaaaggtctctgtaattaaccgcccagaaccattgataccgcgtgatgttaagttttcggcggcgttttccattttctgtgggttgttgttgaaatggcgattttccaccttgctagcgccgacgaagcccaccgccaggaaccgcgaattctcgcgcatttttcgcgatattggtttcgattgtttagaagggattcgagtgctttgaggatccgatccttgatttctctattgactttaggcatttttggcggagttgttggcactaaatgaagctttctttcacatggggtgtcccatttgggtgtcgggccctcgcatagcgagggcccataatttttgtaatttttgtgaggcccggttattacgcaagtactatgatccgcagaacctgagcgtttgggtgagcagccaacgtagagatgttcatggtcaggtgaatttcactgatgccgggacccactagaattccgtcgcagcatattgatgatgctagcactttcttcatcgtgggtcatagctgccggtccactaagctgtcgccgagttatcgctaacaagtgacgtagcatcgcctttatagtggggactaatttaaaaaggacaatgctgggtcaacgtggaaaaatattttgactacggatatctccgcggcattttagcaatgtatgttcaagccgttcctagagagcagagtttttctctcgggtttgttgctcaatgctatgcataatttctaccagtttctgtgcgtcgtctcgagtccgttccatcagctcattctgttcgctgatccattgcagtcgttccttccagaaatcccaccgctccttcgagaacgatgagtctcctttccatagattcaaatcgggctttttgtttgcttcagcaagggtgaggtccttctttcctacgaacttgaaaataatggaccctgcaatctcaaaaaaaggaaccatagcatgaacatcagtctataggccgaagtcagtatctcaagcacagtgatcatattcttttgcgacccacattcagcataaggatgtaattcgtagccacgcggccatctacaaggtgatagcgctgtaagagcgacggcgagggcggcggaagtggcaccggcccgtgtttccacggctcctgttctaatgcaaagacggggattcgcaatgctatgcttagttcgcgtgaaccagggccatgcggtggatatgcggaaagataatgcgcgcaaaaagcgctgctactgtgaaaagtgtaccacccttcaaaagggtagataccgtatcgcatttcccagtaacctgtaatcagaatattagcccctacattaaatcaacataaacgaccctctggaaggaatcttgggcgaaagccttgtgtccaaaatattggagagaatcaaagaatgggatggccattttgcatgatattttaggggaagaagaagtcacgcacggtcatgagtctcttcccaaatgtccttgaatacggccaagttcctccagtcttccagccgatcctggaagcgtgacgtgcgaacctgttcttcggttctatcaaggtctggaagagctcttattgcctctaccagcttcaaaatagcgggttgatagttcggcatctcaatagcagcatcccaaagtagccatgaaacgcgctcccctttatccacagcttgactctggcgctcttgaatcaggtcatcttcgttacgaagtgacatgaagcgatgagcagcgtcatctactggaactgcattggcagtgccgtaacgctcaacaaattcctgcaatatttgaatctcatcccaggttgggggatctgggtcgccatcctctgggtctggatagaagaagggtttccattcggctttgtactcttccattgttgtgatggaagttgtggtgatttgatctggggtcgccccagtcggttctgacaacgaaggcgtactttcaagtgaaagtgcttaggaacagatcgctttttcggggcagtatggtcatacaagagacaagcaaaggaggcttcgctggtggtcagacctctggaatcctaagttgctccacaatggatgctcttagcacccatatagtgtcttatgtatgtatcagcgaaaaatgctggccaagaagcgctatagccaaagtagttaggggtggattcgaaaagagatttgaagagtatattcgatttcgaaatcattttgcgatgtcattattcgcattcgaaatttctattcgaaaagttatgcggaagtctgccaagaaattggttacgtaaatgattggttaacgccagcaaatccacccgtgatttagcgtcgtcttgtcgcgcacgttgtgtataccaaatcctccttacatatggatctcgtaatttgagactcgagcctgtggatcttctcactatcgttgatagcagtatttattttccgcctacaatagataacacctcatcttaccttccgaggtactctgcaacgggtacatggtaaggccgctgaaataacgtgacaatggctgagtcagattatctttggtcttacaccaatactcccttctctctataggcggtgtgtcttgtcctttcgtacgatgtatgaagttagctggccagttacagtatttgcggataatgtttcattcagcatgactcaacaacagataatggaatcacccttagaattagttaaggcaagcacaggtcaggacaagtctcccaggagcaagatatctcctagaaataagaaccgtgggtcctgattgcgagtttcaaccttcaacactctcttttggccctgattcaataccacctgctattcttgaaacttggattgtccttcaaaagcccccagatgacatttgatctattttctacttcatttccacatccggcggaaaaaggccgtttccaaagacggcatttcttcaagcacaagttgaaaatccgtatcccgcatcaggatttccaaattccacagtacatagtctcccaccaactttttgatgtctcccatgccctcagtctcctcagaatcaatcttctcaaaaacaaatttgaatagaattacaatatccccagttcgttcctcacaaagggcgaagtttgctagcagccccagaaggcggttgagtgatagatagcatagcgcagtccaccccgttctgaaagcgaagcgatacatttcagcatggcaaagaaatatatctgcataatgtatttagggtcggtgctcgattcgtcgttggctcggtaagtgggattcacctgaccaatccttcgtgtaggtcggcacaaacaatagggaacttttctggatgaaaaaagttccaggtaagtctggcaggatcccatcgtctcacggattccgtcaatgattgtatgccgatgccgtcgtagatcggagagggggcggagtaatcaccagtatatacaaactcgcagcaacggccaaagactacctcgtcaatgtcctcgactataggaggtcgaagaatctcgcttggaaggagctatctaactccttatgaattaagaatcgctttcggtccttgccaacaacgaacaagacaataccagattccatgaggctatgtgaacaccagtagtaagaaccggtacaatgtgagagatgaggactgttaatgtacctatgatactcaagaaccattttggtagaagaagacgaggagtccgtttcaccagcctggggatgaaaattgtatctttgagggtcgtcggaagggagctgaagtagaaattgaaggatagaattgcttactaaatatagggggctttatttcttgagcgagcgcttctgaagggagaggagagatgaaaccatccattgtggcaagtggtgcatttatattaaacttaccaagtgctagctagcctaggcgaggaaagaaagtgatacgatacgcatggacggctgcggtactgaggagtcaagatggagatggactgcagcactaagcctgacatggattggtgctataacatcttgctcaaccccctcagcagcaagcaggtagttcagttctctccttgccgcagcacatcctctgatgcttcagtacatttgaatcattttaccaaaaccataaccaatgatgtcatctggataatcgaagtccacacactgaaataaaaatgagatccagttctctcttctccgcagaacatcgcagaactgcgctaggattcgaaatgagcatatgtggctagatcttcctcctgctgttgctgctacagctacttcggtacatttgaaaccggtcctatgaaagctaatcaggccacctagttatttgaattcaaggatctaatatattctatgcataacaaactagtataacgagtcattgcttagaacctgcgcgccatagaggtccggtcacagttgagtgagaatcattagcatggcgctgaaagtgcatgacttctgcaatttttttatcgcatacattgcaagcaataacagtgcttgatccaaggttctgtagatgctttcgcttgatatgcttcgaaacatctccatgcgatgagaatagttgcacacgcttcttgagggctaggttttgctgtcccacacaaataaagcaaaacaagggtcgattgtcctttgtgacagatcgaatagcattttcgagtgggcttgccgatttagtctggacctcagtcgtttcgctttccggcttctgatcatcgacgtaaccgctctcggccacatgactttcaacccttttgttctgtggcaaacgacatgtgataccttcctcaaattgacagtaagcggcaacagcatcaatagcttcagtgcgtcgacaccgaatgctggatgaggacgaccatgaataggaggacaaaatagtgctagtagttgttgtagttcagaggtatgaattgtattttattctagagggaaagatgaggttatatatacaacacggacttacaatgaacttggttgtctgtatagacatttcggagctaattccgatggtgcggcttgcttcctgatctgcactagcctcatgtcacgacagtagtatagaaatgtattctgatcctttgttttgattgccgctatggaccgcgaggctaaacgtaagattcaaagttgtatagtctacggtatccagcaggggaatctctggatcgtataggatatcgtaccatcaacaattgtaggaattaacaaggtggttgtttttatatgtgcttcaggggcggactttgatgactaatcagtcctgaggtcactacctgcaaacagtgcaaaatagtgtttgtttaacgtgtcatttccccgcgctggacaggatttccatccagcgtccagagctctgttttgttgcccatgacagtgatggacaaggcataccttccgcaatggggccagttacccgtcgagcagtatttgattgtgagtgttttgcgccactgttgtttcccctgcgtggctaatatctataaagaaacactgggatcactcctcatctgagcctactggagaccagcgcctccgactgatccgtcagttcttagatctagatgagattccgaaggaagtgcaccctaattgtcatgcctcagacacttacgaagcactgtcacatttccctacggcctatggaattgatactatccttcgcccctggcgctctgatgacctacggaagatagcgtggaggatttgggggtgtgataacgatcagttgattttattgcgcacctactataatgccgatgacaacgaacaaatcacggaattagtagggtctgatgagctccacgaggagaatgtagcctggtgggcacttcttgataatcccgaactcttcaattttggtgaccagtggtggcgagtcttcgatatcttgccagagttagccggccctttgaatggttatagccgcctgccagacccagaaagtatctcacgggagagacaggattttaaggagagactaccgaccctcaaacaaagcgacgaatggacggcgaatcgtgataattatattgaaagagagtttgcataccttcggcgaatagcttcagagggctatcttgctattgcagatcaggaagcttttgaaacagatatgctacggttaatctattatgatgggaagaggaatattgtccaagagacccggacagaattcgatgagcagacatttgctgatgttgccgttgaatgggaccagttgtcgcttcctatgcaattatgggaggacggaaagactggtgagaagtatcgagtgaatggggagctgggaagggagttatatcagctagatgaggctgatctggaataagcatggccatgtcgaatctggtggaatcgtggcacatgatatcgttcgtttgctcgttggcgtcatgtatttaggcgccgcctcttcaacagagggactcttcatcatctttatcgtcaattcaatcgtttatcgtcgttccaactgcttaaacatgtgagcgttactagcgccaatatgatagcaggttggaatcaacgtacagattctcccggaccccggctaggatgcgtattgacgggtcataatacatctggtaaatgcgtgcataagaaccaaccgggtacaccacaacacttttgacagccctcatgatgcagcttcctgtatgcccgaggtgattcttgggtagtgagctctcattggcttgcctgtgccccgatcttacccaagataaccaatgtcaaattgtaggctaagaatgagaagactttgcgtctccttccccttgcaggtggacttgtgctaacagcctgattgtctgcagaggtacgctcatctgccaggaagcaagacaaaacatcagcattcctgcgcctttttccacttctggaaagacatcaaatgtcatccgcagacaacgaggatcacgcattcgataccagcagcctacgccacttgaaggtatttgaaaggttgcatgcttagccacaggtatgattcgggtagtggtataggctgatcggagttcaggagttgtatcatgtagacaaatcgaacaatgacctgatacacagaatctagggagaaagaggccgaggtacgcgatacgaatattctggtgactcatcgtcgatagtagtcatgtggaagggacagagagcatgcgacagtatttgtataggggagctcgagcagacaagacatttgttcgcgtggcattcgacttgagtgatagaaatgagggtgtcctgttatacgatccgagtcagcaaggattgatctagttggacgagttgtcgtagcgtacctgttcatggaaatccccaagtacgctcgagacgggacaatcagtttgcgcaatgattatatcggcttcacaactagatcacttacaactttctgcaatgcagttaccagccatgccacgtcgtattcaagctcatcgtaatctgcactcgcttcaaaaaagccgcgttggggtgcacaagacaatttgttgagacagtaaacgcgcgttacgaacccacttgcgataaacattgcacttccatggtggatgaatgtgtcgcgatgccagaggtccagggactccatagctgtatgaaggtggtgggacgagggcggaagacgcgatgaagcacgctcgtcggccgctaccttggtcttatcttcgatctggcggaataggccactcgcacagtatattttaccgtcgatgatggggtggccctataatagcgtgaagatgtcagcggtgttcgtggttagaggaataatgcttggcgcggatggtcagacacagcgcagctgtaggcgttagatctcacttaccttagcatggaaatgggagtctcaaggttctatgcaacgaagttcgcacatggatggccgcaccctgttgttgactcgctatcttggtttgcgatcttctacctaggacatgctgcattgttcgaagcgacggggctaggaatagtgtgtaagccatggctttgcgtggagctctggggagctcccaaaggttcactgtcaattattagccagtagaccagcgtggaattccataactcacattttctgatggtcaagaccagggatgaagagtggcccttgctctggtgcattgtgttcgaacgtctacggatctggctgtcccgcgtctttcgggtcagtgcagtttcaaggatctgtgggcccatatacctacagtgtgagcagttgcacttcaaatatgtggtcaaccagagccgcgacagtagaccggctcgctatagcagagacctctttatagataccttgactagctaatccaaatcttgtatctccgatcggctggcgtaaatggggcagtgaatctgcttggaaccacgtcccttaaagtacaggaactgtctggtttgctggtctacggtgtatactataaatgtcagtacggtataaattccagtactcgatcaaaggggagaacttattgagtgcgtcagatataagcctgctcgactttgtagaatcaagtggataaataggagagcaattgcaggggtagaggacgtatttataggcttctcggcttctgttactcaccgacctggttggaagtgttgaaggacacatttcctaattgaggcctgttgaaacccgcgtcttcttttaccacaactatttgcagcgacatttttgatgccttcagatgcctagcgagagacgagtaagagtggtgctgagagaaaggggtgctgactcggtcaagcaatgttggctgactgttgaatccttcacgttcctcttaaattgaggctttgtgggagatatctaatccgtaatgacaggtatgtattcacatatttcttgtcctagtcacctcatatgtttggcgactcaacgttggatcactgaaaactcctacaattctgtccctagggatcatggaccttgtttctggcctcgcttgagtgttgtgttggtttgtgttgagctgtgggtctgtccgcctgcctagactgcagaaagcgaggtcatatacagtaggatgtgcggttgctcaacccatcaacccgttgaagcttggccaaacgttgttaacactcaattttcgaagttgtgaacaaccttcgaagatacatttcttttcttttcttttatttttcgtttctttccgaatatcttttttggtcactctaaggtctataatgctgtttgccgagtttctgaggcttctaacgggagtggaagaggcgtctagttgaggtatctctcacgtcaatgggtgtttatatctggccctcaatatcgtcaggctcgatcagttttcccgactaacccgttgatattcctttcaaatttactacctagcgcctgttgaaaataaaagtaaattctattcagaagctgacttgactgcgttgattgactatgtggtgaccgtaaaacccagtctatagccatctgtgtctgcatagtctataagagataccaaggcttgtcggaaacagtactatctagatccttgactttttcctgtggacaaaatggactccttaaacagctcgctagaccaggaaaagcaaggagaacagtagcctaatgaattgccgatccttagtgaaaaggactataatcaagagccttcagatcatgtccctccattggtaagtgaaaccattcggctttaaatgctttggctgactatcgtagacctccccttcgtaatacgaagaagtgataagatatgccttggcgaccgagccgtttcaacctatcttgaaggtgctagcagacctcgaacgtgacgatcccaagtttttattcccagcagcccgactcgttggattctatcgacgcctatgggagtcatgcgtttctaagcacattgatctccaaaagattgagcagagtaatgagatcttgaaggaggctggtatgtacctgagaaaagagagggacggacttcagctttaccacaataagtagctagcttgactgcgcttttttgagtatgcaatggaattgtctcgggaatgactgattaacctactcgatgactggaactacccctacagtcctaatttggccgggttcacggacgtcgtaagagaagagtaaggaattgcctattttgggttgccctgtcctatattagtaacatagaaatactacaagcggcgatgcagtgtaagggaaattacaccgtatacaaagtaggttatatattcccgaggcttttaacaagaagggtaccaaatagtcattatttattatcgtggtctttactgaaatgagtatacgaataatcccgcttgatttagattaatctcactcgtaattactcgatatattatgtacaaaaaaccgtgggtttagggatagcgtcgggggaagcctagttaacagagaatgtaccgagagactcgaatacggtagggattccgtacgaggctaaggggacagccggaagatagtgcctgttgcacggacagtatgccaggtgattgtgtctagcaactgtctgcgaaaccgacgaagatttcccagggctttttcaacccgcggcaggaagaacatatcctctcctatagtcttaccagacacccgctcaaatcgcacaaaccgaaattctatccagtgtacctctttagggaaaaggagcgctgatatctggaggaaaatgtcgctagcccgggtagagttggtcagaggatctggacctgtctacctgaacccggatagactgtcgagattgggatagaaaaggtattcgatcaaggaaggctcctgagttccgtattctgcagggtcgtctttgccaaaagaatcctgccacagatcattgggatcagtagcgagacagggaggcggtgtcggtatgccagaagattcatgccagatagcccgaaggtcgagatccaaatcgtagtctgtaatgttagcgcaaactcctatcaaagaaacgggtacagaccattctcgttcaatccattcatttctgctatatgactggccgtcgaacgctgtagggagaatatagaggtgtgtaaagcagcgatttaacgtgggttggaagggatggaaagctggagacggagcagtttttattcctctctattacgcagaatgaggacaaactagggaatctataaccacatgctaagttatcgaatgcgttgaatgtatcaacagcgtgcaccgttggccccgttcaccaacccaacgaaagttcactagcagtataggccttatctatccttagggacaacgcaaatagatagcagaaaatcccataccattctccctggctcgtaaacgctctaccacatggtgtctctatcaaggcccaggctcatcgacggactaggcttgaaaatcgctcgcttccaaagctgaaacaacaccattacaaagagcctgaaccgctcgcttgcgctcccacaatactgaagcttgttcattgcagagctgtagaaggatatcgctatcgcttgctagcaagtcatttgacgtttgaagctgtctctgctcctcctcgagtcgtattttctgggccgatttgacgacgtagcattcccataggcaaactacaagtcgagcaatttgagggctggtgtagcgagggagtcattgaggtttactacttttatgaactccgccgtaagggtacctcgtgttcttactggaagctattcagtattagtggttttttttaatttcccgcccaggggggtatgactgaccttggcttcgatccaagcctggcgttgaaggcgaacatctaggtctaccagtctttccatcggtcaaagtggtatggtatttggcgggactggcctttagccgagctaggtatgacttggcttcgcgcttcgttgacgcagaattcaaaaggcttagaaagaattcctaaattaaacaagcggttagcctatgacacagaaagaaaaaaattcatgtgccacttacccgatcgagcaggttcttctttgcgcggtggccgagacgatctcggttttcgctgctgcccgagaactcggcgatttgctgggttcggacattcagcgccgggcgcgccgcaattgggtcactaggacgaactagatgttgcttcaaattcttagtcagtaaatactcagcattagtggggtatatccggtttatttaccttcaccaacgaggatttggccgttcgagaccagttcagcgttcgagagctcatgattaagcgtatattttgcgaccaatactagtgcacatgagctcgaagcagagtagttttgacgtagagatcaaactcgcatactcggtaccttgtcatccaaggagccttgaggcaaaggagtgttgcacaagatacgcagaaatttgaatgatcagtgagttccttcaacgaggctcatctcgaaaaaccataaacctattggaaactagagagattacgatgttctaaagacgtagggtcgaggatctataaatattccacatagagtgatcatcatgacctcagtctattcgcttggaatacgctttataggagtgaagattgtactgcaaggtcccacaaagctcctgtccttggagtgttccgcatcgccgtggtcaaggatggacctgacgtcaaactcttcagaaaccccggggccttgacgaaattggccctgtggatcgccgaggccattcgagtccaagagaaagagcgtggtgactcagtcaagctcggtcagaagggagcagcaggaactcctctcgtccttgctggcctcgatgaagaccgccatctctatgtagtcgtcggcactggtggcggcggcggcgtcgttgacttcgctgccatcgccaagcgccaggaggagcgcaagaagaagaaagacgtcaaggagaagaaacagaaagagcgatcagagcgccggtcccagcgagcagcagagcgtgccgaacgggaagaagagattggtgcgaagacgaagaatcagaagagtccgagtcctcatcagaatcggagtccgaggacgaggaagatccgcgtggaagcatcttctccgcaaccgatttggtattgccttccaggaggtagtccaggagacgaatgcgcgtgtgcgcatcgacagtttcgagcattgtgttgtcaaggtccagaaggatgacctcggcgggttcctcgaagcattgagtttccgcagtgtggtgggctaaatcctctacaaacacaatcacgcagtctacgacttgtctttgtttacttcgcatgggatgtaaatgatatataggatgggatactggactctgaaaccggctacatgcataatgtccgttgcatgttctacgcttgcaagcattcaaatgcccttcattcttgcatctgtctccaatggggtttatggcgttgttgaaaacatgtctgattctatccagtccatagttgcatcgaatctatgcattttcggcctttccgagagcccgcatatccacttgttaaccttcatgacttcgtctgcttttagatagaacccagactaataggaaaaacaatccaattcctcgccatatcgcggcacgattacccggtcctccgcgagaacgtcctcaccaaccccccacccgcaaagtatcacaaggcgcaagatcaagccaaccggccaggggagatattttaataatacatgtataacaccatttaattttgacacatgcgattctcacatgttctctccccccattgaaagttgacactaatcccagtcctcaatccacgcacattgtgccaccacccaataggtatatagagacacccgccttcatgaagaacaatctccacataatccgcgtccatgaacccaggctgcatttcctcccattgctcatactcagcaggagaagactcaatagcagccagatccaccttggaagtatcggacttgtcaaccagtctacgagtcgttggctgaactccagatacaggatctggatctgccgtctcatcgatagacgtgacccattcctgttttcgagggtgaatctgagattcaggcgtgcgtggcgagtacagccggatatactcaatccatgtacagatgacttcggaggcaaaataaagtaaattcatatcctcaacgccataccacttcacgctcaagtattcattgaacatccattacggaaaggcattaaaatgctgctaccaaagcagcacctgcaacaccgacaaacatccctcctgacatataagtcggcatagaagccaatcccgttgatgttgacgtcgacgccgtcggtgtcggtttcgtatacggcacaatagacgtcgggaaatcccccacagcatccggaatctccggaccatctccaatctccacaatatcgtccggccccggattcccattcaaagcagccaccccaacaaaagcattattgtaattgatggccatatacatatggtccgagaaactggtgccaattgtacctgcgaaggtatcgtcctcctcgtcttctggttgtatgaggaagacacagcgttccccgtattgggaatcccatggacggaacagatcgctccagggtgcggagatcgtggcgtctccgaaaattagagaaacggtgtggttttccgttttgcgtgagcaggggagtaatccgaactgggggtcttctccttcccatccgacgaaggagatgttgtagtctttgtacatttgtagtactatatccttggggagggtcgttgtgatgtattgggtgctcagcttgtacggcttcggactcgatatggtgtaatttgttgggacgttcgagtctgtttgtacttggaatcgagagagagggagtaacacgagtccggtggttatgttaaagccgaatgcctgtaatgggccgtgatacttggctttgttgataccaccgaaaagtatacctgcgcctccgctttcggatatgttgccccatatgctgaatgagggggatcggattagatcctgattgatgagatgataagggaatgatgtgttttccggagatagacctatcgagttccctggattgtattagttttaagtctgaagtcatagaacgaaggtatatactaacatctttcataagtgacctttataagggataatccgacatccttcacttgggtccctcctatagtgataatgtcggtgcgtatggtgtctggagaagatgaccacttatgtttacttgggatttctttcgtgctgttgctggatgattcgctgatattgtatgatccaaatgaggtgcaaaggctattctcccggcattttgagttttcgtagtttgtgtcctcggtaatgacataaaactcgggagccaggaggtctaccaacatgcctatgggctgcggtggtgtaccaattgagacattgatgaaatatgctgtctgtatagatatattaaaattcaatcctaagcaaggatactccaggacgtacctcgttcaacacattggtcgccagagtggcagtgtctcttttctgtagcggcttaggtattttagagccatagagatccatgccgatgacagcaggtacgtcgcgcacaggaaatgtgtgggcactggcactggcccagttggaccataccaatagagctgtaatgagtgactggcgcattgtagagtgctaaatgttgataccaatatttcaatattgtttcttatactccgtacagaaaaggacataataaagggcagagtcagcagacaataaaccgccccaactccaaggcgttacttggcaaggcgtttcttagcttgaaaagtactatgtatggagtactttataagacattattgccttggcatttgttaacaccaattgcgagttgtgctttagccccggtggcggaaacagttccccgtgagtggacatgccaaggcagatggaaattacagggctagccctggcccccagggagttgatataacatgactaatattttaaaagggggctgtacaaaaacacatgctaaatcttgtgtattgactagataaaacatcttctcaaaggccttgaaagaagaatatatactctttatacaggtctttattgcgtactccactgagccctcggttattgtatcctgtcactataaataggcggagaagtacttaataatgatgaaaggtccaccattgccctagctggcccttgcacatgaatcctgaatgttgtcggcgtgggccgtattgtaatgtagggtccaatcaatggtgttcaactctctgtattgctgtatcgactttcctagcaatttatatgggccgtcgattactaatctaaaattacaaaacgcataggatcaatggatcctccggtatgccggtatgccaatgcatctactccgacagattagcagtatgtctccttaaaaaccaaagctgtaccctgcgaaaaaaaatgaataaaagttcatgccaaggctcatagtcattctgatatcatcacaccaaccattcaagcctcgacttgcaaagttccttagttccaaaggcttttcgccgattgaagtgggtcaatttggtcacaagccaccctgagtctaaagaactgcatcgacaaggtgattattggctgaccgcgaaattaagtgtgtggactgacgcgggggcctgttaccccacggagaaccaaacaactgagcctcagtctgtaaatcccccctaagcagcattaaaagctctgagtaacatttccctaagggagaatcattggctactgcttcatagcgatcattcccgtccttatatgtatagtcattgttacttcgaagctaaaagctccccgacgagttcgctgcgaatcctcccgctcagatttgattaacaggagccctagtactccggcctcctatcgaagaagccgaagaaagacactatcgagaacagatttggatgaaatacccatttacagaactggggacttccccggcagcagaaaacgtggcggtactcctgacgtggaaagaggcatcacctgccagcagactagcagctctccagacctcgctgatcaaaatctcacattatcgagactggatagctcggtaagtggatccaagattaagaatgagggcgccaattccggctacacccctttaccggctaagcctttactacaccacaacactggatgacggtaaggccacttccggccttctcctcgccatgccaaagactaccctggatgcaattttggcctcatgattaactatgacagggctaatattgtatctgggtaaatttaatgctcgccatttgaaaattaactaagaatacgatgccaaaattccaggtcccttgctatttcgacccgttgtcatagctctttcaaaaattcagacgcgagggagacccacacgttcctgggatcatatccgaccccagggtccacaacatggttcccaggcacgctctttcttggtcgctccaagggatcagactcgtatttcccagaggacctaagttacagccattgccccactcaagaacccattagcctttattttcggtatcctctttcttagaacaaagggaagatagagagggaggggacaagtcaaggtagggattaaccttttgtgaggtcacctgtgcgtcaaccttggcggtggtctgttttggtctaaatgctctccgaaagatgccaaaacagggatatttcaggcttggcattccactgatgtataagtttcatggtagttcccaatgaaagtcccggtatacggcaatccactagcaacatgtacaacggggagcagtacccgcggacgtatcgggtcttttccacgaaattgaattgatcgtcatgctactcggtaggttatccaggccctctgcgcccgccagggaaggtgagcgcggagacaatatagattagatacgtgtggagcaagacaaaccgaccccgatgctattcaaacctctctagagactcaaggtgtggttccgttgctctcggcgaattccagacgatgtgtcgagccagaggacgctactgcagacaggatccggccaagtgctgtgctcccggagtccttcgatggggtaacgagtcagccaaggactggtttccttggaatacccagagagaacacttcccgccgtggcagccgcgtcgtggatgccgccaatgtccggagttgtccctccattttatgcggacaaatcaataaaatgctagaaaagtcacgtgtgcattttttaaaagaccggtaatcaatgtaatttcttgacacaccactccatgtcatcgtgtccttttcgggaagtatccaccgaagcgtatctgccccagcaagagctggtttggtgagccatccaaatagggctcgactgcaactggcatcttatttgcaccctgcaaacattgaaaagcgccggcacctatctgatcaacaaaacctcgaaccacattcacggcctacttaatcatgacctttgccgggatcttcagaggtttctcctctaatggcatttattctcgttcttatatgtgttttagctggaagctaccgacattttttggctacagcagacatcgtgacagtatgtaattgagcctcgtttacttgactatagctgctaaagatgcttccagatacacctccctagtccgcccggtggcaatatgccccagctcctttctattcacgtcatgtctatctgtcgaggaagcaagaacgatatcaccggctgttcttttctcagagttcctgttcatttcctcccgatcccggtttcggcgaatatgcaaggcgttccatcggtcaaacatgagatcgcctggcctgaatatgttatggatcggttagctacattagctcaaacgagccgactaatgtcaattttttacctcattgcgaccggtgcctcggggctatctagtagttactggataagctcttttcggcgaggaaatttgagctggcatgtacacacggctccggcgcagactcttgccagtcatcctgacatgcctccatcattggtggaatttttaagccttgtagtaagtcaaaggccttgttgctataagggaagccactctgaccttcgtttcattgcagatgagtacgttctgtatgtgctttgcgtcgactattgcatcgatcatttcggaggaatttgtatatctgatcaacactgatggcaatccttacggggtttgggctagccatggcaattctttcttaaagttgtcttgggcagccacgactctccaatttttggtagttgttgaatcgttcatcttaatcctcaaacgcagaattggttgttttctgtgcgataagactagttcttcactagtggataaatgtggcaactgatcgccctcgatttacctctagcgatttgatgacgggccgcggtatacagtccacaatagccatatgttctcaataagctgacttcttattaagctcccaagtgcgcggtgtatattactgtttgctaatgaatggcctataatttccatgggcttatctcttctacaaagttgaatccttggcctccttttcggttttgccgtggagtttgggatgttaatcatcagccctgcgttgctgatcatgagcggtcacatagttcgtctcgttctcctctactcccatactctctcgcgggttatgtgaaatttctccaggctgggaatattgaagggttgtcttggcgtcaacaagtggcccaaggaggcgtcaataccaatgctctttagcgcagtcatatttgagtcttccatgtccaatctgaatggaccaaaacaactttcacgctctgatatacggcatcatgtgttatcttgacatacgttgcctcagaaataccccaatctaatactatgaacggttctaagctttcggtatgatagaaccaacagttgaatagagatttcgattggagtccttatgttctgaactgttcactccctggtgactacgctgactggataatcgaggactatggtttcctgtttgatgctttcccatcatataccctagtacagaatgttttgcgcggcatctgtgaagagcagcaagtcattatggaatggccacccggacaagtctgcttcgtgttccattttcacaactttgcctaggctgagaacaatgagcttgtacttttactaactatagaagaggaagaatggataaggtctatactggcttgggttataacaatggaagaagttggttgatgccattccaatgttatccggaatgctattctggtcacgcggggcctacatccaacggaatgccttttcgggtcccccttcccgagcagcctccttaagaatccggcggcagtttaattgcaaagtatctactgtcattacccgacacttgcaataacagtttgcagtcgcgtgtacttcaatgtaagtctcgtttctagcaatggacgcaataagtgccatagcccggtcatacgtagtatggcgggtggcctctatataacacccgcacctagtaaaccgagggaagtcatcctgctcggaagtcctacataacggaccagaaggcccatgtaaggtaaaaggcgagcagcattttctgtggccatttaatgcaatacagagagagcttgcgattatcttcaacgtagccggaggtcgctggttagatacatccgacattggctcctccgttcgggcttcatattctcctcggctgcttccccaatctcgcgcgacggctatttagtcttccaccatgcacgtcgcgacgttgacccattagagagataaagatcagccaaaattgactgaatgaagaacccctaccggaaaggataatctttacccggatacccaaacctacatagctatacgcggaaaggatcttgaattatgttgaatgtaactttaggtagacatagcaagccgctgtatgttgttcaccgctgcttggcgacttcctagcccccacccctcggggaccagctccatacttgtgcacttggcatagaacgctcccttgtgagctcgcgctttactctctcctccttctatgctttgaaagaacccagcgggcaaggggtgggtgagcgatcagggatgtctcttcctatttggcctttccactgatcgtgcagtttctcctgcttatcccaatgctcagggatcctttgctctgcgtggctgggtgagtttaaccagatctccctgcgtcaacaagacacctcgcaggataggtccgcgtgaacaaatatcctcgcaggcaagagctgtgcaaccaaggacttcagagcttccgtgactacgactgtcgctgccacgagcccagtgacgtaagacctgcgctccctcacagccaatgaggccctgtgcatgtaaaaacgcgctcatccatgcaagacttggctcgtcaaggacttgttatggctctccagcaacgtgcagtcacctatccgtggtgctgggggccagtattcgagtactcaaaagtattcgaaggaaagacctgtgcgacatctccgtcatctggttcatatttcgaattattgccattggatacataaagtgagccctagatagatattcacaaatgtcatcacccaaagtaagatccaaactggactttcttcgttagcaactgccgtattctcagcctctgccttgatattctgctacctggtaaagtccctttgccccggcgttatacggtacctgccagcaaattttagagcaaatttatactaagtattgatgtgtgtcaatgtcagtgttgtgatgagggttgtggtgaatgttcgggcaatgaaggaggtgctcaacgtctatcccacggggactgatagggacaccaaagttgaggtgtaactttggtgtccctatcagtccccctatcccaccctcagattatgtaagtttcctgaatagggggttcaacttgaacttctagaaatttatcgagcgatatccttccacagctctggaaggtacaggcatcaatattgtgggaccacaaaagagcagttcaagctctttgtaatggtgttggttcaaccttggaagcgagcgatcttcgagcccactctgtcgatgagcttgaaccttgataaagtctccatgcggtagagcgttcatgggcaggaagaatgacatttaatttccgctatctattgccttatctcctaaagattagcgatggccttggaggcgcatacaaccaatggtgaattttagttgggtttggtgacgggggtcaacagtgcacggctgttgatacatccaacgcattcgataatttagcatctggctataaatcccgcctggttgacctgattttgtgtaataaaacgggaataaaatcactgctcagccgccagctttccatccctcccaacccacgttaaatcgctgctttacacacttccacattctctttcatccctcccagcccacattaaatcgctgctttacacacttccatattctccctgttgtgatatgaggctggtacagatcaggaagcaagccgctccgtcggaattagctccgaagtgcctatacagacgaccaagttgatttccaatcaacttggctcattgttgtatatataggctcatgtatacctctgaaataacaagtcaattcatacctccgaactacaacactccctacagcgttcgacggccagtcatatagcagaaatgaacgaactgaacaacaatggtctgtacccgttgcctacgcgggcatgtactgcggaagaggaagataaaaagcctagtttatactttctaaaacttatataattatactctccctacatgatgacagatatcagctcaacaataatatcttctccagctgattacatgcaaaccacgcgttgaccctagacccttatacatttactttttcatcatgtcctgcaaacctgctgatctacaatgggtattgggccaagtattgggtgaacccttgcaccgtgagcggtgcatatgggtaggagatgacgggaatcattgtcaaaacactgtgccgcttgactccaggataattggagtattgtgctttgcgctgctccaggcccctccgttcgcgtatcaactagcgcagtaattttcgttggctgcatagcagttactttgctttgagtgcagacgccatcgctgtcggcggaaattgtgggccacccggattttgcagttgttggatggtcgccaagatcaatccaaagatgtctcgatgcactcaaaaccattcacggttaccaggttacagcatacgcctcttaccatagcaaactctacgtgtaatgacacttgaaatgcttgtgatacccattgcgaagccagttttatcaaagttgtagatatccgcatatagaataccatattactcaataacttgctggacggcggcgacccattgctgaattacaactggatctccacattgcgcctttgtggtctgattgacgcgagaaattattagggagctcggaatagcgctttacatagttcttcgcccaatacttgccggccatttgatagggtgttcaccgcgcgcgctacgcgagtatattaatcggccgtttctcgcgcaagagtggttggcaccaatttcacgatgatccatagaagttaataatctttatagcaaatcttttcactgattgtgttaattcatgatttgcgcgtgcagcaagacgattgatgggtttgtcctggaagccggcgctggagggtagtttcggaccaccaaatcgttctgcccttcctcgaatggcgggaatttcgggggctgttgtttatcattacattattatttttaatattattatttgtatgcttgtatagcacgtgggatcccctcttgacccggccaacgaggtctccaaatggtgcgttctggtggtagatgaattgtagtgaaaatgtgtggaggaacacgtggtcgcggatgggcgacccactcagttgtctgatccactccctgtccattacgttacaccttcagttgactctcggcaggcgggcgctggcgactattcagggtttatcgggtgacacgtctcttttgcatcatctccagtcacatcagtccatgttctaatccacagcctggtagttcaagatgatgtcacccctcagaatacccaatatatctcgaaataggcgtgatcagtgcaggaggcgggtcaaatgtgataagcaggatctcccgtgcttaaattgcatgtcgcccgaattagattgtacttacttgaagggtatggtatgcaatgctgcttcttcacgccctcaaagccatacagttcccatttcctactcgaagtctggctcctctccatggcagggtggtgtcaactcgccagagtcaaaacattcccgttctaggcaagtgaatgatatggaattgatccacaaatactctacggagacataccgaagcctttccgccaatgattcggagaattctatttagcaaatcactgttccatctctcgcacttcaatataaatatttaataaatggcatcctggccctggctttaatgtatatagccacgtcttcagagacctgcgaagcttcggtttatcttaacacgggcctcaagtactacgaccagagtttagcactatttcgggacgaactcaatgatataacgccacaaaattgcaacgccattttcgcaaattctatcgtcacggtcgccgtcaccgttacttcgtcactactgatggacacgaatagagaacactcaagcaaaacagataatgcagtgatcctcgttaggttgttgcagggtgtgaaaatggttcttcaaactagtcggccatagatcaatctagagctctttcctcataacgaatgctgggataatgccgtcgctaagctagacgtcgacacatctacagcacttgcacatttagccacattaaatgataagatcatgattagtatttttgctgagcaatatcgcaccaataagaaactcatctcccatctccggcattattatgccgaattcgcacgctctgctagacttagcccagtcctggcatagcttactgcagtggaagaagattttatgaaaagcctgagatatcgagagcctttttcgctactcattctcatatactggggcgtgcttttaggcgagttagacgagcaacgatagtaggctcgcgattcgggaagagccttagtatctgagttactagaagccttatcatctgataatccaagcctggagcatacattcacttagatccggcgcaagatgtcgctttaaggagtatcaatatttggggcttatattgatagttaattttttaggtcaggaatacattacagtatcgtctctgcaagttaaatgggccactccgcatatagattacagtaggagaattttcgaagagaaaggtataaagacccattacagagaacaatccctcataagaacgcgtagccatatacagtaatctacattagcaggagatgatcgagcgtcgaaagttaaatcaacttttcattagttcactgaatatacgattgttctcaggccagagggataatggtggatattccagcaggctcagcatgacttttcttagtctatgtacagctctttagtacgaagtctggactaatattctatgactaaaacggaccattccaccataccttccccaattgactggtcagcaaagagacagtgccgaagatctcttagtctataaataccgacacaatgttgcaaacctaccagaaaatttgcagatggcacgcacagtcatcgaactcgaggtctgccagaccctcttctagagaacgaaagcagaatatatgatacttgatggattctagtgctcatacccgatacgctcacggcaaagtctccgaaacccccatactacattgtataccctcgctaaattggccctcgagcttctcgattggtaatccttgtctatgggaatgctacatcctcaaagctgccaagagacgaggcgaggatgagcaccgacagctttaaaagttatataagcggctagcaagcgacagcgacatccttctgcagccctgtggtagtttgataattaggtactggtattttgggatcaagagcgagcagttcaggccgtttgtgacggtgtggtttcagcttttcaagcgagcgatattcaagcctacccattgatggaccttgctgaggtctcggctttattggacgtccgtgttagagcgatatttgatcaagtccgctatcgcgttctctcccaaatatcatcactgattagaggcccatgcaaccgccggtgaagtttgttcgatctggtgatgggatatcaacggttcacggattttgatacatgtacacccaacctttgattttagaggacttagcagccggctataatctttccttatttgtcctggtctttcgaggatgaataaaacccctactcgatggcgcgaatataaaggagcaagactcccaggagcacacagccctacaggtggccgcgagatgtggccaggaaacagccatagctgactttctgaacggggaagccaacgcgcatgccctaggccactcaccacagtatatttcaccgtcgatgatggggtgcccctacaagcgtgaggacataaagatgtattgtgatatgagacagggtgcagatcaaaaccaagccggactatcggacccaagttatctatacgaagaatcaagttgattgtgttgcgatatggggctggtgcagatcaagaaccaagccgcgccgtcggaattaatcccgagttatctatacgaagaatcaagttgatttccaatcaacttgaccttctcgttgtatatatagcctcatgtttccctctataatgatacctccataatgaaacaatcaattcatacctctgaactacaacaatattcaatccgcaatgacaggcccatagttcttgttctgattgctcctctcactttttacaacccctcgatatcggctgttttgcggtgttaaagcattcgtacggccagctggttgaattgaaaatgcgggttgggatgaattatgttgatgaacttgatttcctcgaagcgtaaccctcgcacgaattgagccttataaatcggagtctatcaaaaatagctaaatagcctcggacgacctggtttagtccctttttcacaggagatagtgatttcaaagcttgattttcagcctcgaaccctaaaaccccctccgagccggggtagccattgggacccaaaaacgccttcgaactatatccagctacaaaagcaagattcgccaactaaggaattgcttcgtacgagatcaagaagcccccgagcccgttgagtagcgcgataaaccaggttttaaagacctgccaaatcactatgcaatctacggctttgcttgagaaagaagtgagcgagttgcgcgccgcttgcgagaagcagaagcaaaagcgtacttgatcccagaggcagatacctgccgaagagggcctctcagttcaagaagcatctgcattgattatgcacccagaggaagcaattgaagcacctctctccggtcccggcatttacggagaatcgggtttacagccgcgtacaaaacccctcaagggcgtggaatctgtaggaagccaggaaatagaagagagacgtgtccaaatatataacgagtttacttcgttcaatttaacgccgttgtggttgagataaatgcatttcaatgggctggtggggttcgcagctcggccgggaaatacgttattagggtcggattgcaagatgaaacaaatcttgccccccagtcaattttcgtagccaaaaatgcctttttgatcctatcggttttgtgcaaggagtgccattggctgtgatgtgtgaaggtcaagcgatgaaactacgactggggtattgctatgtcacctttgccgattttcatttgaccttggggattgattgtcttcttgtggcaaataatcttcggatttagaggcttacatcaatttatcgtaggctagtaggctgagctagatctcttcaagtcccattgctgactccactctccaagggaccagtcctaagtctcatcattatgtatacctaaactcttgaatgggttatagaccgaccattttagtacattggcagtctccagcccagccaaaacctcttggcggaactgaagccatgggacttgaagaggtctacatagtatcgatactgtctcacgacgtacagtatgaaaaccagtgtagctcgttagtcagcaagcattgctaatcgactctgggaatcaacgggttaatcccggaaacgccaaaagcaattctagggctttttatttcctgggaacttctctctagctcctggggccactttctgtttctgtcaggatatacatgaagcatacggaacggatggagatatgatctacgcgggacccacatggtgtatatgggttcccctgaacgcgaggaagcctgttccttttgcttcctcgcgctacgtcttgtatagagtcaactatagttgttcttaatattgattattcaacttgaaacactatccacctctatgtatatgtgagaccctcacggtttctaggaactgaggtctacccctgggatcttcactctacattccttacggaatatgaactggctatgggaatacattggctggctcgtcgtgggcttcagatatcgatcaactatatagaggatagcgggcctctcccttctagagccgagaagagaggaaggtcttcagtgacaacacgaatgctcgctggccgagacgctcagattgacgcagagcagatctctggttatcctcccgtctggtgcgatgtgtaatatgtcatgcggtgtcctgggcctccatgtcgcaacgaaggacaatattgctggcaataagcaggggggaacaggcatcatagattaagaatacaccctcgtcaaatatgtggagcaaggtcgagttctcgcgacccacgaggacgttcctgatagtcttcgccagcagctctatgctgcggagaaccagcaaccggaccaaaaaaaaacgaaagctgcggataactctacaatgggttcaatgtgtcctccaatcagtatctatgtcctcccggcagtatcatcccaactatcactatcgatacgcacccctgctaatgatgacatgcccactaggcccgactgtactggatcaaccatggtagacggcctgctaggtgtcactgtggaggaatataccgaatggcaacaacggcggtgaacaacgagactttcagggagaacatcaagaaagcacgcgatgtaacccttgtaaattgtttcgacctcatgcagatttatgagggtcaaggccgaggctttttgtcaaacagggcgtgaaagtaggtgctacccggctgttggtgatgtatgtctacgacatgtgcgacctacagtactggggtatggagtaaggggccgagaggtttattctttcacctgctggtttgtgataatcctgggtttgcactgatcctcactctaccctatgaagaccttgttgtgaggtgtcattgtcatactttagttgtaggtagtgtgtggagttatgcctaaacgcttagatggttctaagtttcttaaaatacattgtagataaaggcattcctttattcagtcaaaactcatcattacgctctccatgcttctttctcttcggttgtgtcacgtattgctatgtacgtgtccgtggattatctcgcgtcggtggtctggatgtgctgggctagatacaccgcgattatgtgtagtagtgtggagtttcacaataagtccccacgaggaaccggtatatgttttagatactccgtttaagcgtcatgccccggtagtgttgtccaatgtaatatcctgtgcatgggaatcccggagggagagaggggccgtggagctggtacaaccatgacgttgtgtgggatgaagtgcagcatggccgtaagggcgcacggtgaagttgccggggttggtcggggtaataagcaatagggctggggtgtgttgtagaagtgctcaggattcgagacgagcgttgcagcacaggggttttcagggctgtgtccgaggaaaggtcgtttgggtgagacatagctgagaccggcaccaggattgaatcgcgaaggaggataacggccgtcgagcggatatcgttgttgctttggagctgaggcatcccccttctcgtgcactcatacttgaagcagcacaaatgcaagatacatagaaattcagatgccatgcatagatcaccaatctagaacgcggaggagccatactaaggacgcccttgctatgagtcttcctcccctgggccatgtttagaaaggaggtgaggatgggaaccgagcaaaccatataatatgtacagtgcggtggtggcagcatgcgattttaccattggctccttacctattttcatggtcaggaggctccaaatgaagcgtggaacgaaattcgccgtgccggcaattttgggacttgcttatatgttcgtatgctccgtttcccctttcatcctagagcttatgctgacaatgagcagagctagcgtggctgtcatagtccgtatcccatttttgcattacgcaggcagaccagacttcctttgtgagttgattcacatcgtccacatacgtcttttcgtctagtatagtagacgaaacaacacatatttcgatatggtcgaatgtagaacccagtttagggatcgctgccggtagcctaatgacgcttcgacctttgcttcgagttttatcaaaatcaggttcatcagtaacgaaccaacacagactcgttacttcttttccgatgctgagtagttgttctgatggtgaggaccttgaatcgccttgcgaataccaaacccactcttataattgcggtcattttgcaaattaatggagtcaacttcttggcttgcaatgtaggagatggaggggaaggtttgccacattcgtacagtaaaacaggtacactagcaccttcattaaccagctacttatggtgatctccctgttgtaacatattgaacaatgaaaatatttgcagtgataaatcgatttttgctggagctggggggttatctgcatggcctgggcatttccttgacgacggggcttgtcttatacttgtcccaaaattaaatagtatgtgtcactggttagcccttgggaaccagtaagacatgcatggagcactcggatggaggctagatataattgacctcggtggtttgatggtcacgctgatctggtttggatcatcaataaaacggtggggtaatatctaaaccgcccatagaaggcggttaccggtgcatcgatgaagatgtaacgagttaatattactttatcaattataaacaccgggcgaaagagccactgaccatgcggaaatcaagaaagccgcaaatataaacacaagaacggtttagattacgtgttcttcttgatcaggaattatcagacaaagtcagttatcattcacttttgaaaacttcgttagattacggtctttatcaattgcattactactctaaactatcaccgtccaaacccggacagaactgttacgggcagaatgcacaaaatagtttgccgaaagataggggataaataatgtcttgtcagaacttctctagccactttacacatctcaagttgggccttgacctattagttccacgcaatcactatagtgcgctcaactagttgctgtctacccctttgctaatcttttaaattgccatcaaacatcgttgttagatcggtggaggaaatgtgcagtgaaaataggaaatataatgaagaggcaacctcctgcaacatcatctactctatcagactaatggaagataaacaggtcgcgcttgtgtgtacatatgttgcattatattaagcaattcaatttattatacaccggcaacaagagcagttcgtttcgcagagaaagctatgatttcatatccgatcgaagatttggagcacgcaaagcggttcgaaccacatggccccggcggctgttgccctaagaaaaggctcaacgctcatttgaccacttgctcgatggattgagatatttttggcatctctcaaacactttctcttgggcgctttcttttgatcactttgtaccgaggcccatgttgaaaagcattatcgcgaggcgaaagacgcgaagggctatagctcatctcctgcttcggtcctatagagctaggctgaccgcgactgaaggattcatgatgaaagtcgccaccggatttacgaaatccatagtaataaagccgcctaacaagagattggtggcttttagtggacaacttttgaagtatatgcgtaggaaatctgctttccggggcaacgaagacagattgcccatcttctgaccaacgcattactgcctcattttttggatcatcaaggattctttcatatattagtacacagggtaacagtattgatgatccaatgaatgcttcacttactcgctcagatcctgaatgaagtcggatgcatgaagcctgggttctggccttgcatcgctctcagggcatgagtcagctcgttgcaagtcatccctcgcaatagcaacttctggtggagctgaatcattcagctcttcattgactggctgaactgaccggtcattgctagcattctggacagtcaaataggggcttgatgaatcttggtaaccggagctttcttgttctgtcgaggaaacaggaccaaaaccaccttgatttggaagagcggattgagcaccatccagcggtagagctcctctgttattgacgtggtccttgtttccagaaagctgagagactaagtcctgatgattccggagatgttgctcaacaagcgaaatttgttcctggactacattgatcggcttaagcttcctgtactgcaccacgggacaaaaatttcagagactcaccttcgcttattactctccgagcatcaacaagctcttgcaataccgtgtcgtttgattgaagttccttctggcaatcatctttatctggccaagggaagagaaaccgccaaggcctacccgagcgtaagagcctgaggtcattctctgataactcaacgctagaggttccgaccctaagctgtgctgggccctcaaactggggacctgcaaacagaacaacgctggtccaagtcaacggtggcccttcccttacggacggtattgtaatcgagaaaaggctctctagactcttgctgaggctgttgctagtcaaaacctctccgcggccaaaggcaatactgccaccttcatttaaaaccgacaaatgattggacaattcggtcgaaaattcggaaatggaggtatcggcaagcctaagaggtcttagacttttattatgatattgagagacaaagttgttaactattttatcaatagtttggcaagttctatcgccgggcacttcgttgaaaggagtggtcatcatttcagagcacaggtttgagcacaccctggactccaggaggcagaacagcagaacatcaatggcggtaaggtgcttgccgaggcgggttaaagttactccgtgttactaattgctagtcacagccactcgacgcacgtcccacatatagttacatactttgagcatttttttaaagccgccattctttagccaatttatttatttcggtttggtttctttctaatcttgttcgcctatcacataccacatttccacttttgagattcctacttgtacgcataatacgtatccattggttaccaattacaaagatatattcttgggcaaggaggatcgaatgagtcatgccagtttctacgacattgaattttacctcctagtaataacgtttcctgctgccaccattgtcgcgaaagacgagaaagttggaaataagaataagaaaagactgctacgtcgattttatggtgacggtgctggcaggaaaagatgattgtgagtacagtagtctgcctcaaattctttttgcacctgttgaataccaccgaaatacccgaaccactcaagagacaatattctataaatgtgtattttgactactagtattaatgatacgttctagccgtgttgtttatacaccataaactgccctcttagcgtcatcacgctttctcatgcccttgcttacaaaaagaatgcctattacatatgccgacttgaccgcaagatgtgtaccgtcaccaggtagttaatgaatcaaagctgttattgttgtctcatctttgtccaacggttatagaggagttagagagatatattaatacgcataggcgaagatcagtgataagggaatgcacggcgagtcgccactagccagccacctcacattgtaccgtttctgaccatctttggccacttagcgtctgctcagccagacactgttcccgaagctcttacctgctatccatttttaagggacatggccagctgcgccagacgaccacggccatcgtcaacatggaagtcacaggccccagcgcgcccggcctggaagatagtgattaactatagttcagcaacaggggcgtacctctccagctgaccgaacaaaatacccgcgcgacacatcatcacgaagtttggttaacctcaccctcagccaatcgttaatgaggcatgcaaatgatcatgagtgagcgcacggagtcaaaacgttcgaagaggcaggttcgacgagtgggtcacaaaagcttgcccttgatctccaggctgttccatttcccaggctattttatggcacgataagcagatccgttcgtagaatagagagcttcaccataggatcaagggagctatgggtatgatagagctctcgcatgcaaggctagaaactccaagcaaagtcacatcagcttggagcaattgaatctagactgtcaaccgtagttagaccatcccttctctctctaccgagatcagccccagccccgtccgcagcacacataccattatgcccaatctcgagggtgtctatgaatcgcccacccattcacttaaccagcagagtgcctgcagagtcattgccagcgctgatgagatattcgaaatgtttcggaccggctcttaagaagccgacacatagtcctgatcacatggccccgatcccagtcggcagtccttgccgtgcagcaaggtattagacaggcgatgtgagcctcgcagagcgcacgcaacaggcacagcagtccggaccctacacgtggaacctcaattaccaaatgtgtatactgcctgaccaagacttatctataccttgtatcctcatccacaatcacgggatgtgacgtaaactggacagaaccatactgaacttcgtatttgatagggtgatttgatgcaacgaacgacccgacagacgctgactgggccaccataccaccgtgtctactcgctggcatatatttaccacgcagaagaactgcctgtgtggcttaaacatcctccactaaattttcttcaagcccatccagcttgtgtggattctataccgcggtcgcccatatggcactggcttgctaaatcacttaatgtctatctttacgaaagccaatatactcctttcagatgcggcctatctgtgaattggccatatgaagccctcgactatatactgtcagacgaggactcagccggaaaatcaaacgacgtactcgtaaaatctgccctttgcatataaagaatatctctaactggtcactaattccgttatttgcggagagctagtcgtggctgatagatgtcgcacgacaatcaatagtaggtgacttactggcccaattacattgttgacatggtcgtagcccagctgttggggtattgccgtttaatctacctatattctttgtccgagtgtctggacctcgctgaacttggtctccgtgaaacctaatatggcattgcgattatcaaacaacgtgaatatctttgatcttggcgaacgttttccgtattggctctgctcatctgaacgtggttcatgtcgaatcggtttgtagaaaatcggatggagggctacaaggttgtggttgggggatttgtaggtcagttagcacgaaaaagaacagccctagagagaacaaatttcaactgtattcaaaagtctatcccgttgcttctcgtgcttgatagcaggaaagttgacaattcagcgccatcgtacatctcgatcgccaggatcaattttgaccagagtaatctagtggccatccctccggcgttagctgcccacagaattcagggttatagacagatgctgtcttatccagggtagccacatagcgattgcggcccttgcgtttcccatacgttgcatagtgtgctttaaggttgtcgcgacgcaagaagctgcgttaacacccaggtacctagcagaaatgaggcctctcccctgaatggctttccaggtgacgattaagggtctttcgaagtttgaaataactcctgtatccctgaatgccgcatttgaactgccgtcgagtgacgttggtctgggaacctccgaggctcaaattggacggatcctacgaggtatatagaagattgacaggctgcccgaaggcttagcggggttcagcaacatcattttggctatcgtgctatagtgcctcgagtggccgtgggtagggagaattgatattcgcttggtttgggaaaaggcaagttccaaagaaactcggcacatagtcaaaattctcaggaggtggccctagcaggaggtggttagatagcactgacgtaggcagatattcgagctaacagatcataggccgtgatccgcaatagatcgaacctagatcaatcgagcagcctggttgcccgtaatagtggctatcacagctgccttcgtgcttttgcactaagtggggcgacgcctgataaataactaggcccccatggttttaatgaaattccataccaggccactcggtagggctaggagcaatgtttgctttcaatttggcgctattatagaagagcgtttgtatgccatttgagaatgccagattatttctaccatatatttgcgaggatagtggtgtgatttgttgttctatctgtagacttctacccgtaaataacatatttgcagacatcttttgcagatagccgaaggaagtaataagcggtaaagtccgacacagcactatagatatattgtccagatgccacgcttaatctgtctgggtgcaagtatgggatgccgggtagaagtttttaaaaagttatgactagctaggagaaagtcgactcagtagtagcaacccttatgacctttggaatttccatagtatcaagcttttattcgagaggcgaaaagagtggccgagtaaattttcaccatcacacggatagcgttaaataacggagacttgctattttgcgttaggttacgccttgaatagatttgttacaatgatagggagttgacagataaaaagcccgctgattgaacggtggtcaaatacgtgcgaggtttactttaatacatagtgttgttaccgaccacaacctcaaacaaggcgtgataaatatgaacgccagggcctaacatttatacggactctcaacaaccttaatgaccatttcttcaactcccgtataccaaacctggctacccaaggataggtgatttaacacaacagttattagcaaaatggagataggggcgtccaacagctcgccaaagtctaagttaattggaaatcaacttagttctttgtatagactcctcaggatttattccgatggtgcggcttggttcctggcctgtaccagcctcatatcacaacactttccactgcgcacgtactccatgatagatatacccagaaagcacaataatacattcctcaaaaaggctgactggtgagaccacagtgaacctgaatggtagtccttgactgcccaagattgaggttaatatagcagacttcacggtgggaaatgaacgaggtgtccgataaagagtcctagtggtagttaatcactgcctcagttcgtcaagtaatcctattaagaagaccacgcatacagtttcccatcgtttaaacattcactttagtagaataacatacgttgctgcatcgattacgatcgactaaatcaaacaaatctaccatcctgagcctaagcctatacattgacagaaattttctttcctaggccatcagagcactagcctctgcttttggtaatatcttaaaatcgtgtaaacattgtgaaaaattcgagagattggttgctcaccttctttttacgaattttcgagccctattcaaagccagcacgtcttagtgtatagcctcaaatctcatagtatcggtgctaatagaactgcggcacaggctgcttggcatttcccgaaagccaagttgcatgccattacggaggcaggtgcactagcacccatagtagctccccaggtaaagcctactgccgagtagcaagccataataacagcggcacatcctacttggcaaaccccgtaggcggctggtccggcagatacaggagggatgaaaagtaggagattattaataagcacccacgggactctcattttttaggacctaaaagaagttgaaactaggaaccccaaagtatttgtgctgtaccaagagtatgctaagacaagggagaccatactgcctaaatagatagacattcaatgatacgtcgccaaacggtggctactctctaggcctcatgaaattttgcgttccgccgtttcctagaaaaaaaggcaaacggaatccttacgtttagaaatgcagacatacctcggatgtatcaaatgcaaggcgtacgcaagggatcaacacaccaattacattgccattttccacatgcagagagccgatttgtagtcagcatttcctgtcaccgaccgataggccatgaatgagtgagccaacgataccccggacttaaaaccagttatccacctcacagatccccacccaaagctcacgaaattctctcgatgtgggccgaatcagtattcgttcaatcccagaaccgaaaacataagtgatcatcctcgagagcagatatgcaagaacgacaagtctgtctgagtcacgaggaaatcgttcgacagagaccgtagaatcacgagcgcaaccgtctcggctggcctgatcgcccgcctgcatcagtttgcatcagtttggcctgttcatggcaaatattgaaacgcactggtgagaatacctgcacaaagtgaggcatgttatgacctctccttcaactaatttcatgctgagcgaaaattcgcttcagattctggtaaaccaaagagaaatactattcacggccgtactaggataggggtgtcaagttcatggaaacaccgtcgttgaaggaacgttgattgacagggaaatcttgcgcatatatatcgggcctcagcaagaactactctgtcaaaaaaagagcctagggcttcaagtatttcaatccgggtttttcactatccaccgttgaccctcatttaaaaaaaaaaaaaaaaaaaggggagactacctgtagttaacgaaggtgatcatcgaagtgattggcattctccgttagctgccagcgccttcatgttactccccactgacggcgagcctggaagtccaagcacgtcccataattttgagttgcgggtcgagaatctggatcaacgtgcctctgcttgtgcgagatggaccctctcacctctggccggcgataaaaaacgtaaagctactcgctctacgctgagttggccagaataattcctgtaaatacatctgatgttctactaggccggctacctgtttcgtaagcgtataaagggatatactaaacttcaaaaagtaactttctgcgtcgatcagctagtactacagctgcaaatctatttttaaaccattccgagacgcgcttaggcttaggccacgaaaagaaggtcaaagcttaccaagtccatacgcgcctattcctccgttgatcgaacgtaggcatgtatgaacacagtaaaacagcccatgttataaggctatagaagatgaatgctctagcatataaagtggcataatcgcgtcttatttgcaaattcgatcgacgtgaagcgttcgatagctaccgtgactattaataatcaagagactcttcaattcaatatcaaaccaaatgatcctggtgatatatgatttgactgtcgaacatttgcgtgatccttggttgtgatgaattgcattatagaaggtacattggggctaacggaaggactggccacgtggacgtttataggggaacttgccatatctggcaactgaggggtatactcagagattattccgggatcttcttcgctaagactgttttctgttggctgctagacgcgttcggctgacttagtctgctcggtcagagatggtttgtctaatggaaaacggactttcagtaccagcggatcgcgcttggctggctgggctggctgggctggttttttcttagcttgcgtctaatagagagaccaaggcagcgagcctgaccagaaataaatgaaggacttcgtcccctgtggaatatctcctcgtattcttgcgctatccgcgaccaactcaagtgccccctggtactcaagaaagcgcgcaattgtctcttttctaaagggctccacgctgaagtcatctttaagggcggtatgtgactctcctctccggatgtgcttagcgccgcaagagtactgcccgtctccccatcccgacaatggtcggggtttggttctacatcaattctagttttagtataaactgcagaatctgtgtttacatccacatcacatatatggatttcgacgggggactccgaagattctgatctggtaaaatctctatcggcgctatgggtctgttcttacgaaatttggaggattgtctataccgtctcgttaactagtagactttagcctatagacccccccctttttttttgacaggggctatgtatcaccctcactttctgaaatgtcctctcgcaggcgagtcttaaatctttgatcaactcagttctagcttctcgctctgcttgcacatcttcgggttcaggaggcatcaggagcagcttctgtagcaagttggatgaaagtatatcacaatcgcttttgctcaagtctaataacaggccccgaatgcaaagtcgatactggtcctcgtcacgtagctcaatttgattattcaaattcgattctcagatgagatcaacccagctgagatgacctccgcgaaggctgtcgtcactagccaattccacgacccttgggcgagagctactgaataaaccgtttatcctgtcctctattttgttactaaagagaggcttgtagagctgcttggcgacactgccgtttcgatcaaggattccgatgtacagtctcatcagcttcagaattggctgtaaaccatggcgcaccgtctcaatccgcggcagcggactagatacccgatggccgaaaaagtcaatgggctcagtgggcatattactcataggacttgggattatactggcgttttgatggaccggttctaccgaagagaggagagcgacctttattcaatccattgccagagaccggatccctgccgacacaagagtagagaggactaattgaaaagaattactcgaaaccctcagtggtaatggaaaagggggaagggttgccgtcacacaaccaaaaccgcttagtaaacctgggtactttgttattaatgccccgctagaggagcatgattcgctgaggctcttgtttaataagagtgtggcatccgattggttgtgctagccaacacgatggattaaatcgaccagtgatcggagggctagaagcgccgttacgacactaggagcgggcggcggaaatatcgagcagaaaattctttattagtaaccgaacacagtcaagagatctcgacggatccacacatttggcccttttccgccttactttttcgtaaatgtcatatggcttaacctaccagtttcatacaaagctttaagtgaaggtttaccaaagagatctggacgagcaaaaaatgaagattgtagtagatttctatgtataattcatattgatctgttgtttatggcccgggccagggatcgggcacggtccgcgcgcggtggaaacccccggaatgtttacccctgatattaggaccttcccctcttttgtgtcccatcgtacacttcttgggctagggatgtgatgatagcaattcagcacaaattgcaaagtattgctgagtgacctgaatgaccaaataatgattccggtgcgcagaccaagaatgtaaggcgttttaaggagactttgaacgagcatgaggtctagtgaggggggcagctcttggttcaccaatctccatagtgtgacaaaccatccatggttccaaagtgggtttagagaccaacaaggaagggagatggtctagttaatcctcgccgtcttaggcgctgttggtgatcaaaacggtcgaaagctgccgagcgatcatatttaggctcggtaccaaaatttcaggaatcgtagaaacttagccaatcggaattgagaagctcctctaacatgcggacccgatatagtgtcataacgcaaggaagtaataccgcgaaaatgtatcaaacattgactaggattatcgagcgccgtccgctgccatgttacatttcaaaaaattgatttgcaaaactgcatcaaccttcgcttggtgatccgaccggaggagttgggggcatcattgctgatcgacgggaaactagccatcaatgaggtgggagtgattgaggctgtctgcttttctctccatcgatttgacgcaataaacgggatgtagtgggttcggagtatcattattcccttgttaggcgatctaacgctagaagatgcagatatcaacgcacaagcccgcaatatggatgggagattttgtcaagatgcaggatgatattatcttttttaccatgtaaacatgtgattttttactatgcatttgcttactaatagtgtctgaccagattgttaaattcaaaccattgttgcttttagttagagaattgtaccgttgtggattttacccgtacgttcgccatacacctgatttctgttggatttccatttaccgacccttgacggaggtggaagcaagaaccacgtttgtaaatgtggaggcctaataggctgccgctgcgacagggagtaagaagggtcaagaataccagttgttcctagatagttccatgtacgctcttgcaaactcagtagaacttgattcagatatgtcagtcatctgctcctaatgttgaagggttgtcttggtaaaaagaacccttgaaaagaggaggccgaaaatgctaggacatgaaatatgacaggttacttagagaagaatgatgttattgtaatttacagtgaatgtttgaatatgacacatagctgactcttgctcgcgggaaatgttcaacgggtgtgtaaccactttgggagcgcctcaggagtttggcatcttcgatcccatttaacgcgtatgttattgtttgccgatcaaaaccaaaccaaccgaccctattagatgtcatttagagacacaactacgcttccacaaatcattttatggcatcgccgaacgaccacgagagtcatttcgttagcaaacctcgcagaaatcaggcgtttgtctgttctggttgaaaaaaaaggatgccctgccagttcgcctgccgcttttctgaatctggataccagacaagcattctcttggcgagatccagaaacccttccttctcctctccctcaatgaagggagcacgtgtcgcgtagtttccggtcggggatcagatcttcgcaaagggttgacccagaatggttcgttagtctgggaatacttggatagaaaaacgcaggcttcggaaccaaaccaaacaaccttccgtccaaatgggtcaagaacaaaatttattgatagcatacagctccgtgagtgtccaaatgatttgttcccgctcgcttgttcatgtcgacagctcagcaacgcggagaggaagaggcatcaaggactctatcagatgtggttattgggtcttactacgctccttgaattttgagtcttgcattagtcaggcataccaacgtctgatctgatgaaccaaatcgactggagactggaagaaagggtcgagtcagccgacgtggtacccactagcgactcatcgaagcgaattgtagtcatgtggaatatagagagcatgcgaccgttagttgttggggggtgggggttgagaagacaagacatttgctcgcttcgcattctaggcacggaaatctgagggtgtcttcctgtggtgagatccgagttagcaagcgttggtccagctgtccgagatattggatttacgatgaagcatttcccgagtgtacggttggatcatcataataccagcttaccaactagatcattgccaatttgattctgcaaagcagtcaccattcatgtcatgttgcatccaggttcgccgcacttctcccactgtcgcttcgagaagccgtgctggatgcactggtcaagttcacaagacggcaaaggcgcgcgacgaacctacttgtgacaagaaactgtccagtctgattgggagaccgcttcgtgtggacagtgaggggctccgctgttcagtgtgtgaagatggtgagggaggggaaagacgcgatggcccgtcggccccttggtgttgtagttcagaggtatgatgattataatttcagagggaacatgaagctatatatacaacgagaagatcaagttgattttcagtcaacttgattcttcgtatagataattcgggattaattccgatggtgcggcttggttcctcatctgcaccagcctcatatcacaacacttggtcttgcctgactcggcaggaataggtcactcgcgacaggtgttttcgcgattggcggtgggctgctcctacaatggcgtagagatgtcagtgatgtttgtgtccggggcacagacttcgcagaaaatcaaaaccggcgcagcaggaggcgcgatattcccctcacctcatcgtggagaacgaacgtctggagcttatgcgtcctgtttttggccagcgaccttggtttgcagtatctcacataggacatgctgcatagtttgaagtgacagggtaagaatcggtgtgttaaccatgatcctgcgcggagcactaacggagtgccggttcggcctcactttggtgcgctgtcaacgatttccagtccatcgtcagcttgtcgatcgacgataaatgcatgattcacaagttctgaaaaggcgcgggaaagggctccatgactggtgtgtattggacagaattcacagacctggtggcttcgcatcgtctttgcagtcagtctagtcgcggaaagggtccagacaacttttgaacttatgaatagtgttgagatagataccttgttgttgcacttttattgttttccgtgctgtaaattttacaacatctacttttgggatttcttggcttttcaacgaatgtggaaaaagtgttgtgattgggatattatatcctttggacctttcaccagtaagccagtaaaaatgaggcacattcaccaaccggcagatgtatatacatactatagtggaaatacttaaattcggccggttccatgggctcacaggagttgttgctgtcctagcaaaagaacaagaatggtttgctatattcaagtgtatggcagacagcatggaattactacggaaactgcataccaacatattcaacttctagagcaggctatcaatcacaaatttgaggaaagtgctcattggcacgggaaatgctatcaccaggatcgcgtacgaccccacccatcctggctccgaagggatcttgtctatgcatgtgcaggggagaaggggaacaaccgcctgaacgaggtgtggtacaacacatggattttccgcatcaatctcaagattgacggcgatttggatgaacggaccgcacgcacgctgctagggttacacatgaaggtggagaggatccagtttacagaaaggagtcccaatgaaactacgaagcgtatgcgtgaattgagagacgagatcccatggttggcggatgggtcggtagagatgagaaacacgggggattgtcgattcttcggaaggcaatttgagattggaagggatatctgatggacgaaaacaggaaaggcggaaggaaatgctacacgtccgggaaaaatgattgttcatcacgtcacaatgttggatcccatgccacgtgatgtatatagatttataggagcgtctgcccaacaggcagacactccgctaggcagcagggagatgagctgctgcaattgcaaatagctgtatcctgtattcttctatttttctactaataacctcaattcacggcctcaactcaacgagcggtcaggtgaattgcacacacacagtaagaaatagatacataaaatatatactaaagagcgaaactttccatcaaggttagaaaaatatcaactaagcaatgcgcatgcaattgggtgacgatgtcagcgaaggtgctgtgcgcacgtatcacctatgcgagtccctcctgcctgcttttgacaacttccttcttcttcttgtagttcgcgtcgttgccattgataatccttttcccctccaagtcatccagaagatcaaggacgtagtcttgacagttataccccgggtattcgttgtggatcggcgcctgtctcgctgcctctttgattgaggtaaccttggcaataggcacatcgcacaggtaaatcagctcggaaagtgttgctgatttacgggcatcggaagctctcatttcgaagcggtaattggtcgacgaacccatgatgtggaggactgtctgttccgcatccgtgggtccgttaacaaagaggctccagtgtttgtagacacctccgtcattgtagatagcgacatggattcctgcagtcgaagacatttgtaaagtgtagacggctaccgtaagaactttgggacgtggtggatgggtcttcgagcgtaagaattgtaggatacggtaccgactgttggagagcaacagaaaatgcagcaacagtaaaagcacagaaccgggaggcaaggctgtatttggtaaaagtaagaaaaggccttggctaagagcgatccggtgccctgttcagacttaattgaaggagacggaatgaaatggttctgagattagggagaacgatggttgtacttatagaatacactgaagattagatactactatacatttgaaaattcacgataccgcttggcaaatgtcaagcagagcaactagccatccatacatgtatcatgttagaacactgtcgtccaatcaattagcgctaaggtgtctgtaagtgataccaatgtgcatgagataggcatcgaattctaaatttaggtcgaaggaagggtttcctagctgctgaaaccaaagagcgtcacgctattttcataaccatgtaagcgctcgccatgtgtgacttgaacgcactgacctgttcgtaaatagggacggattggcatctcacagcgaatcacaccaaactcgagagggacctgcattgattagcgccggcctcgacctccatcccaccaatacaagattcccattccctccgaccaccatagcgcctaaagctgcttatctattggaagtttcaaaaatgcggaattagatggataaataggggttagacaattctagctaataaaattgatctctagcagctggaatctaccttgcccaaggtttaagctatgtggaccggacgtggatcccccaaagtcggtcaacaagccaacgtatagaatatttagaaggcgagatgctctctggtaagtagagaaaccagtcgtcttcatccactagactcagggtgcgcgttagggtagtacactcatagtacgccggataaaagccgctgtcctcccaatcaatgatcccagtgacaatataatgaccattgatattccggtcctttgtcaccatgatattgtcaaccctaacatcaccatgggtgaacaccaatctatgtgccatatcaggactatcatggtgtaggagggatcgaaggagtgtgacgtatgtgttgctgccatggtgacgggccgaaaattgcaggttgctaaactccatggctgtagtgatacctttgaataaggcacattcgtcaacgcgaagctctttagccccttctccgcgaaccccgccgagcgcctttccctcgtcctgttgaagagacctcaatcgacagaaaatgtcttctagctgttgttggatcgataactttccctcatgtgacagaacaggccatgcttgagccagcgttgtgcccggaatataggacatgaaaataacccgaaaaggaccgaacgcgatcaagccgtagggtctcggagcaggtatatcgggcgcccgctcagcaaggaattccatgctcgtgtattcggtgtaatccctattccccaagatgactttggcaacaatgtcgtcgttgcacttaacaacaacgcctctaacagggttttcccacaacttgggcgaattccaaagaagttgtttcaaaggcacaaccaatgctttcccattgtcacttgacccgacttctaaagcatattctgaaaattgcgccagcagagcgaccacctccttagacaatggaaagatgaccgtggcagtctcggcaagatcaagccgtgtgcggaactcgggggcttgtacctcgggagcatctttctcgaccagtggcaataccttcggtccagtcgccatagtaatctttcgattataatttgtcgggaatttggacagcacgttgacctcgggttcgtccctgagtgtatcacggagctcatgcaaggttcggagattgatttccgcaggataagatagctgacgatattgggaattccgatgttcaagacgatatgagtcggagaacattgacatcaggtcagcctctggattcctttccagttctgcctgaaatgcaaggataagatctctgttccattgtgctgcgtccgcgttggagagggaaagagcttctgggtgaggagtatcacccatagttggtgtcgttgattgagacaagccagtaagcctaaagatattctcttgaataacttgagtgtggccaagagaggcgagctctagggacagatagggtggagccccgtgaaggtgggactcgcctaggctgcaataagctgatggcgcgcaggcgtgcttcacgtgaccattattgtcttacccaccccacacgtaggctaagctcctgggagtgaagagtgggtttaccaggaacttgcaactctttaacgtatcgaggaaagatgccaggaagagcgcggaatagatatataccgaagtattggtctacctgtgagtgttgtcgagttacagataatcaagcaaagactcagtaatacaaaacgcaaacacaagtaaacaatgtatgactgaggacggagaactaaactaggtacatgaacgcgtattcttatatatccctgagttcaccccttgtgatgagtagatagtagagtggtaaaatctccttggcagattctactgttcgaccatctacccttctacaacctgtaaggtcacgtggtcatgtagctccctaaaggggtaaccttagatgaaggtgacatccggtacagtgaagtacatatggctataaattcccctagcttgccctcattctgtgtaataagagatgaataaataactgctcggcatccagcttttcatccctcccagcccacattaaatcgctgctttacacacttccatattctccctgttgtgatatgaggctggtacagatcaggaagcaagccgctccgtcggaattagctccgaagtgcctatacagacgaccaagttgatttccaatcaacttggctcattgttgtatatataggctcatgtatacctctgaaataacaagtcaattcatacctccgaactacaacactccctacagcgttcgacggccagtcatatagcagaaatgaacgaactgaacaacaatggtctgtacccgttgccttgataatttcttgcgctaacattactagtctacgatttggatctcgtccttcacgctatctggcatgaatcttctggcataccgacaccgcctccctgtctcgctactgatcccaatgatctgtggcaggattcttttggcaaaggcgaccctgcagaatacgaaactcaagagccttccttgatcgaatgccttttctatcccagtctcgacagtctgtccgggttcaagtggacaggtccggatcctctgactaactctactcgggctagtgaggttttcctccacatgtcagcgctccttttccctaaagaggtgcaatggatagaatttcgatttgtgcgatttgtgcgggtgtctggtgagactataggagaggatatgttcttcctgccgcgggttgaaacagccctgggaaatctgcgtcggtctcgcagacagttgctagacacaatcgcctggcatactatccgtataacaggcactagctttcgactatccctttggcctcgtacggaatccctaccgtattcgagtctctcgacacattccctgttgactaggcttcccccgacgctacccctagacccacggtttttgtatataatatatcgagtaattaagggtgaggttaatctgaatcgagcgggattgttcgtatactcattttagtaaagactacgataatgaaaaatgactatttggtgcccttcttattaaaagtctcgggaatatataacctgctttgcatatggtgtaattccccttacactgtatcgccgcttgtagtatttcaaagttgctaatataggatagggtaagccgaaataggcaattccttactcttctcttgcgacgtccgtcaaccctaccaaattgggactgtaggggtagttccagtcatcgagtaggctagtcagtcgttcccgagatgattccagtacctacttaaaaaagcgcagtcgagctagctgcttgtcgtagcgaagctgaagtccgtccctctcttttcttatatacgtaccagcctcctttaagatcttattactctactcaatcttttggacatcgatgtgcttggaaacgtatgacttctataggcgtcgatagaatccgacgagacgggctgctgggaatgtaaacttgggatcgtcacgttcgaggtctgctagtacctttaagatgggttgaaaaggctcggtcgctaaagaatgtcttgttacttcttcgtattgcgaagtcgaggtctacgatggtcagccaaagaatttgaagccgaagggtttcacttaccaatggaaggacatgatcagaaggttccagattactgtccttattactaaggtttggtaattcatagggccgctgttctcctttttcctggtctggcgagctgttcgaggcatccattttgtccgcaggagaaagtcaaggtctgggcgatactagttccatcaggccttggtgtctcttatagaatatgcagccgcaggtaactatgtactgggttttacgatcaccatatagtcaattaacgcagttagcttttggatggaatctgtttttatttctagcgggcggttggcagtcaatttgatagaagtgatagtaatcaacgaatcggtcggggaaactgatcaagtatcacgatgttgagggccagatatgaaccctcattgagatatatatttcaatcagacacctcttccacttgcgttgaaagtcttagggactcggcaaacagcattgtagaccttagagtcaccaaaaaaagaagttcggaaagaaaagggaaaagaaaagaaaagaaaagaaaagtatcttcgaagattggtcacaaattcaaaaattgagtgttgacaacgtttggccaagcttcaacgggttgatgggttgagcaaccgcacatcctaccgtgacctcgctttctgcagtctagtctaggcggacagacctacagctcaacacaaaccaatactaaagcgaggcaagaaacaaaggtccatgattcctagggatggaattgtaggagcttttcggtgatccaacgttgagtcgctcatagatgcgctgatcaaaagcaagagatatgagcatgtcattgtcgattatatttctcccacaagcctcaattaagagggccgtgaaggattcaacagtcaaccaacgttgcttgaccaactcagcatccctttctctcagcaccactcttactcgcctctcgctgggcatctaaaggcattaagaatgtcgctgcaaatagttgcggtaaaagaagacgtgggtttcaacaggcctcgattaagaaatgtgtccttcaacacttccaaccaggtcggtgagtgacagaagccgaaaagcctataaatacgtcctccacccctgcaattgctctactatttattcacttgattctgcaaagtcgagcaggcttgtttctgacgcactcgataagttctcccctttgatcgagtactggaatttataccgtactgacatttatagtatacattgtggaccagtaaaccagacagttcctgtactttaagagacgtggttccaagcagattcactgcccatttacgccagccgatcggagatacgagatttggattagctagtcaaggcgtctatgcgaagacgtctctgctatagctgatctgctatcgcggctctggttgaccacaaatttgaagtgcaactgctcacactgtaggtatatgggcccacaaatccttgaaactgcactgacccgaaagacgcgggacagccaggtccgtagaggttcgaacacaatgcaccagggcaagggccacagcttcttgtggtctcttcatccctggtgttgaccatcagaacatgtgagttatgggcttccacgctgatctactggctaataattgacagtgaacctttgagagctcaccagagtggccctgataaccttgcactaccgtcagtgctccacgcaaagccatggcttacacactattcctagccccgtcgcttcgaacaatgcagcacgtcctaggtggaagatcgcaaaccaagatagcgagtcaataacagggtgcggccatccacgtgcgaacttcgttgtatagaaccttgagactcccattcccatgctaaggtgagtgagatctaacgcttacagctgcgctgtctaattatccgcgccaagtcttattcccctaaccacgaactccactaacatcttcacgctattgtaggggcatcctatcatcgacggtgaaatatactgtggcgagtggcctattccgccagatcgaggataagaccgaggtggcgaccgacgagggtgctctatcgcgtcttccgccctcgtccctaccgccttcgcactattgtggagtcctgaacctctggcatcgcgacacattcatccaccatggaagtgcaatatttatcgcaagcgggttcgtaacgcgcgtttactatctcaacaaattgtcttgtgcaccccagcgcggcttttttaaagcgagtgcagattgcgataagcttgaatgcgacgtggtatggctggtaactgcattgcagagagttgtaagtgatctagttgtgaagccgatatgaccattgtgcaaactgatcgtcacgtctcaagcgcactttaggattcccataaacaggtacgctacgacagctcgtctaagatcaatccttgctgactcggatcgtacaacaggaggacaccctcatttctatcactcgagtcgaatgccacgcgaacaaatgtcttgtctgctcgagctcccctatacaaatactgtcgcatgctctctgtcccttccgcatgactactatcgacgatgagtcaccagaatattcgtatcgcgtacctcggcctctttctccctagattctgtgtatcaggtcattgttcgatttgtctacatgatacaactcctgaactccgaccagcctataccactacccgaatcatacctgtggctaagcatgcaacctttcaaataccttcaagtggcgtaggctgctggtatcgaatgcgtgatcctcgttgtctgcggatgacatttgatgtctttccagaagtggaaaaaggcgcaggaatgctgatgttttgtcttgcttcctggcagatgagcgtacctctgcagacaatcaggctgttagcacaagtccacctgcaaggggaaggagacggaaagtcttctcattcttagcctacaatttgacattggtcaaaccgagagggtaagatcggggcacaggcaagccaatgagagctcactacccaagaatcacctcgggcatacaggaacctgcatcatgagggctgtcaaaagtgttgtggtgtacccggttggttcttatgcacgcgtttcaagccgaagcactatttgcaaagaccatttaccctgggtctcacttcagctgcaggttagtcaagtcgaccgcgcgtatcttttatccgttcatatcgtctcctaacatatcacgcacttgtcaggaaatccgttttccctacatcccctatttcgactttttttttaaaataaatcatatattcgtcgagcctaccgcgccgcggaggacacgtgggcatgttactgttcggccaggcagccactgtaaagaatttggtgtccgaaaccagaatgtttatgggacctcttggactagcccctagatcctggagcaattttcccaccgtcaatcaacgctcatgtgatggttgcttttggaaggatggccggattgtctactacgactacgagcgaactagcactcctgcgggggatatcacctaacggatattcgtttcagacaacactactagaacctaatcgggtttcaatcaggtcttaaccgtgttctcttatcagcagaatatggttgattgtattaacctgggacactgcttcctaaaaggcaattgccgtcacttcgatccgggattggttgaaatatgatccgtcgttgccgaggcatagtaggagccaaccgggtattcttgattgcttgcttgtccagtctctcagcaacatggttgtctctgtggtaaaattactttgattcttgcgctctctgggatataagagctggaatagggtaaggtcgagtgactcacaatcgccgcctgaagtgatgactttgacttcgtaaggcacaaagcctaccgtatggctgattttactcaagctaatcgttcggtacctcatcatatgcttctacacgtgggtcttgggcgtattgcttgatcatagttgaaccagtggatctactgtcctatcggactgaggctgtatgcccactttaccgagtgatcagaatgggactagaaatggcttgcgaaatagaatcgacagtgattgatacatttatcatgtgggtgagatggcaagaaaatctccgtattacgtccgtgtgacattgatagacctcgctactgcctataaggcccatagatttgcactgagttactaccccctgcctataggcgggcgggcggttgaccgaagccccgtgtcatataatatgtccataggttgcttactaataagcactttggtcactgaaatttcataattttacaatgtttagccacatatgtatatatcctatagtactacgtattcaggttatttaagtagaaaaggatacaatggatgtgtccagctataaccaaccctagtaaaatcaatggaatatcgagtctaagtgaaattgaaagtatggtccgaaatgtatagaaattgtgatacgtctgcattgtgtataaatatatacatgaccacaaaacatgctgaacctacaaaaccacttacaatataatgcctaccagtcgcatctgtaaatttattataaacacgacatattagttatactacatactaggattcacctttattatgatcaattatctgctatactagtggttattaggggtaggtgacaagtgatagatttccaagagttgaacccccctattcaggaaacttatataatctgagggtggcatggaccgatggcaaggcctagacattgaccacctttttcaccgcccgatcaacacacatcaacacttaccaacactcacatcaacactcacattaacactcacatcaacactcacatcaatactcatatcaacactcacatcaacacttatatcaacactcacatcaacactcacatcaacactcacatcaacactcacatcaacactcacattaacactcacattaacactcacatcaacactcatatcaacactcacatcaacactcacatcaacactcacatcaatactcacatcaacactcacatcaacacgctcaccaacacgctcaccaacacgctcaccaacactcacatcaacactcacatcaacgctaacggttcaacgcaacaagcattcctagacaacactcatctctgtttgcctaatctgaatgaaagatgccaatttctattgtagcgaggaagctattggatcataagctaccaaaggaaaggaatgtgaaatacgtcatttgatactgaagacgctttagttgttagtttatgattttggctattgaattggcgaagatctaactagggctccttctatgtatctaatgatgacccttcggaacaatgaacagacgatgaagatgttgcgcaggtctttgcttcttcgagtactcttgaatactcgaatactggtctctaaagatgttgcgcaggtctttgcttcttcgggtactcttgaatactctaatactggtccctagcaccacgaagaggtgcctgcacgggctagagggactttttgtcgcagatgtccctgcggagactcttggtttcgcagatgcccctgcgaggcgctttgttgacgcagggcctaggctgcggagaacttggtaatgcagcggtctcctgcagagaacttgttaacgcagcggtctcctgcgggtctcacttgtcatcacagcgtccccctgcggagttcacttggtaacgcagcgcccccctgcgaggattgttgttcacgcagacctatcctgcgaagcacctttttacactcgcggggctcgtggcagcgagggagcgcaagtcttacatcactgggcttgtggcagcgacagccgtggtcacggagactctcaagcccgcaggcaagagagggatactatgacataccggagtgtgaggaccgaagtcctgaatttttttgggctgggaatcgggctccttttatatttttcggctacgtctctaccaaggaaccagttgcgcagttggtagtgagagtcacggtctcgttaataagcgttgaagtaatttcaacgacgttgaaggggtgtttggagactttgtggcctatagactcaagtctcgacctggcctacttcctcttaaaattgtgcgttgagtatggtgaaccactttcatcaactgttgaaaagaaagcaacgccgcaaacgtatggttcgtacatatcatcgaatttgcaattaaatcgcttaacgcgcttacattctacatgtccccattttaaccacggttaccatttcttaatgagggttgaagtgcttcgacagatgccgaaataatgggctggagatggccgacggaaacgctgtactgtacctgcggttgcccgaggaccctttggtctcactggtatcaatcctatccatctctaggctcgcgccgctgaatgttggttctttcctttctactcgcagctaacccatattgcctttactaaaatctctactaggcgcataggcactgtcatacttctaaactcaggacgaagattgtcttcctttgggaagatataatagccaaaaaaggtctagaccctttgaaaagctcataagaaactgggtctagtttccaggacaaccatataaactgatgcaaccaaggcccacgagctaggttctcatgatcgccacccccttgcaagattgtaacgctactatcacactgatgagaacctggacacaaataggaccaggcagcccaatcaaacgctacgcgtgaatttagacagacgcaggtacggttctgcgatatagatctcagcgacgacccacgggatagtagatcagggaggttctatttgtagagagaaaatggaaacaattgcagaggtccagatataatccacaagcctaaagttttcggccattagtgtccgatagaacgggactttgttgcctaggaggtactactggggcaggtgagtatttggaatagtacgcagactttggcgacacaatggtaagctacaacccgatccgtggttgtgttcttggtcgcagttatgagaaggtaagttcccctattaagtggcaagctgaaatttgcctatctggtctgtaggacgttctagatgctatgtatcttctcctgcaataagctgataattattgctctctttaggctataataacacttcctctctatatctccaaatctaccgctatttcaataactctagcagacgtattataaagaactatactaattatagacaaaccacataagcttaaataaaatgcctctgttttactaaaaccggttggcccctggacaagattttattgtagaccggccctcctgcggccctaaactttatttcaatcaatctgcgcctcttgatcaagatgatgaatttaaaggaactttctaataaaatattggtcttactgtagtgaatttatcctatataccggccgacggagattgtagtgattcttttctagttcctatttttaggctgtaaaggcttaatcacaagcagcccagaaagtaggtaggaaaactcccagacttgaattcttcattataaccgcattctcttaccgagcggcatttctatggttcatctaaacgagctctcgaaatgatttgcggtcccgctactaatcggcagtcccgctcgtggttctgtggtctgtgccgaactttgatttccttataacttaggcgtgggttaaaagtaaatcggattcactctatagatcactctattttcgaccaccgattcaactaaacctaatcatacatattctcttaagctaataaggttccagatactttcagtcccagagtccccttgctatcctgtcctatctccctataggaacgcgtatagtatcataagtccttatacactatccgcagtattttacagctatatagaccattcccctggtctagaatgacaggatgaaactgtgtcgctgggcctactctcagatatacaatcatactcgaatacttacctttaactttggaacttccttaccactgttgtaattctaatactataatcacgtttcgattttgaatagtaaaatacaaatagataaggtcagtaatacccctagatatattatgtattattactgatcccgcctcgttgttgtcctaagttaagtctcttagcttaagcgtcctaagctaggtaataatcaacccctaaatcgctgtaaaatggcgcgaaactcgagttcctagcagcgtactatagtcgtaaatgataagtagtaagaacagtctcagtatattataaataaccaaaattacactttcttttcgctacggatactggtatatgctagtattaggtgtcctattaagacgcattaattgtttttctatctggatcgtgctgttaaagtgttatcggatcttaggagtcgttctcagcgtgatataacgctaatatgttgagcgtaccccgtttactatacagggataaagagagaataacgaataaccttgtccttagtggtaaaataccacccccccgccccctacagtttaatagtaacagttagcaataaaagtaatttcggagcaattaagtaatccaatcttaattatatactaaatttgttcaagatataacgattttaggtcttccgatatccttaattagtaatagacttggttcggtggtaagtaaggttttcactttgtcccaggtacttatactgtaaagtcgggaaaaacagctgatttcctgtgattgcttccacaagcatatctcgttttatattatcgcgaactcttgaataactgtagatcttatgttctatatcctccagtgcgtagcttaatctctacctaaggaaatatagactgggaattattgcttatatccgatacgaaggatattcgaagatagtattatgtttaaggccttccccctcgaagaccgcaaggatacgatatttattagtagcaataccacctttaataaggtattccttataatagggtgactttcttggacctagccctgtatcaatatatttaagcctagaagcagcttcctccgcactatatacgcctgccaaaccctctacctatatagtaatcacaataatatcaactcttccttcatcctctagtattttacattactgtatggcccgcctctaagtgccgaaggataggaaccgcgtaggtttttagttctaagagagatgattattaaagtctttccgcgatagcgggcttttgtctcttttccgtacacataagtagccttctctgaagcttatattactgctgcactcagcgcaaaaaaggatagagagttttacgtcagctggtaatggatcgaggaatatcttaatatagtatttaagatatactagaagcatataactcgaagtacagtgagaagtagtatgtagtctgttcttggtggcttagttgctacaaactgaataaataatggatcattgccgcccagtgtataaggtcgaccgacctttcgggtagctattaaccatgtgatagtctgcatatccacaaaaataataaaggttataacactatataactacctaggcaactatggtgagttctaggtatttatatccatattataggttatactaacggccacggaagaaattcggtactaaggttatataatacttacgaccgtctaaatatgatttattatatatacaattcgcgcaggtaagaatactagggaggtatatgccatattttgaagaatatggatctcgatagaagtcactggaaactgcctaagcgaactttccgacaattgaagttatttccctgaggcactaaggagatatgcctcaatctcttattagtataaatactgagcgcgctcgactggtatattgtttattggatatctgcagtagaactgctctagcttcgttaaggcaataaaggacaaaacgatatatattaaacctaaaccagctatttagaaagggccagtaatattgggaatactgagactatatccttttaaaagctaattactttaatctacagttaaaattgtctaaggattagggaatttccaaatttatatagggatataaaacacattcacgcggttgtacagtactcggatacggatatagatttcgctgaagaaatttaagacgtagccactatcgcttattcgatatagtaggaaagaatagcacggagaagaatctattatagaaatgaaaaatttgttacctttatatatacctgtaaactaacgggagcttatattccttacagaataagagacctcttttaggaatttaaaaaaagaaccacaaagtaatgtatatctcggctatattttctctatctgacctaccgcaaataatctttttcatcacattatttatactttatatggctcatcaggctacattggcgactctatacaaaaaggttattatagccttaaaaaatttataggaaaccttcggaaaagggatagcagagcgaccaatgacatactaaacataagattctattaaatgcaaccacaaatatatcgaggctctgtaagaaatagggatcgactagaaaataaataattacgcttagcgtttctgcgttacttctatacgatttttctaataagggaatagtaggtctgccattattcaattgatcttcgaggacttgaaaaatcacccctctaatttaatatcctatatatagtatagtttgtatttaaggaatcgctagattacattttggtatattggtaggtaagtagtagagtactttatgccctgaatggacgcttatatgaagaatttgcttgttaggttgcttggaaacggctagtggacgatgtggtgatgaaattcgaagttaaaactgtagtaaacgttacctactatttctatcctgtggtagccttcgatctactaaataagttggttctgcagattgttagcaagtgttagggaagtatgcgcatttctaaaagattaaaaagagttttaggttcttaataaaggcttatatatatcgctgctttagagtcagggagctgggtaagcgcaacgtcactttgaataaaggcgaggataatttgtgctagatatatatagcaaaaagcaacagatctaaccatgaccttattgtttaatcctcatttaatccttaaagattgtttgaagactattgatgattatagcttctggtcttagagtataatcagcggtttattaggctgactaagtctaacgagttattagatcatggaaaatatgctctaggggtgtgtgtcttttaagtcccctaaactagtttcgacaaagcttaataagaaataaaagaaagtaaacggctaaatctatatctacgataagctgcgagtatggtcttttactatttctcttaataaatgtcaatgttctaggtggaagagaatttacagataatcgaaaatgctatttagataaatcaaagtatctatttatcgttatatcaaaggctataatatgttaaaacaaaaatcttccaatatttgatgtcgtgaaagtataattaacctaacccagaagtggatggatttatttattataagacccgcatctgatggaatcatgaaataatatcattaaggaccttcggtatttatattagctctagtaagattgtaaggtctggtcggaatggtcagtctgtacttacattagatctaagaataatacgttgctctacgatatttagcaatgtgctacgtatatctaattaggtaattagtgactgtacctgtagagccaaagatatataaacataggctaatcccgcctgcttagcctatagatagctcttattctctagatttagtaatattgtctatatacttgagtattaatatttttaattattaccacctccgttcgaatacttgtcggctactaggtactattgaacactgtaattgcggaaatatttactgtggctaatactagcgagctactcctaggtacaaactgtgcgcttatacacgtaggtgagactattattagttttttgattgccagcattggtataaagaagaatgtatcttaaggtaagctccttaaagaaggaagatacctagtctaataacttgaagatatcgtggtaagcttgatggcttaagccaaggacgtgacctatcaggcatttatagtaaggcaatccggtatcggagctttattagaataagtctttctaagtagagaatttactattttatagctcttattagcccttaactctctagttagagctgtgtggtaagtaatataaaacttagaagacgtagtaagggctattatgcttttagagtgcgtatatctgtatagaactaatgatttaactaactagccaaaaccctaacagaattgtcaacacaaatcgagatggcttggatttaatagccggtttcgaaaaacaactttgtactaggtcttacttgtctattctactcgatatagaaataagggagtttaatatagcggccgagggcaataagatctacaatatatcttcattctattatacgtttaaaggaattgaaagagtgatagagcctatatacgatggtggcatatccttctaggtatcgtgcttattatttggaaatcctaggggtatattattaccgtctataactatcgtggaatatgattagttagtggatctaggaaggtttcccgaagtagtatagcttaagacactctctgtaggctttcctacctttacctgtgaactttctataggctgtagctttaccacacttgaagattccttgttacccagtgtttccgctcgactacctataaaacctcaagtcaccgttactagccctaaagtaaagattacgaacgcctaaataggagaaaatagctagaagctatcaattctatataaaacgaagaaatgcagataaagtggattacttcctctataagatactttcttttggaaagagattaaactgagactctaagctttggttaattcttcgaagcctttaatcaatagactatttactattttagtataggtagccagtgccagctcgattgtgtcactttaggaagctcttcgctccttataggttattgcagagaagttgtaatcggaacggtatgtacgtgatttgtctagtagtatcaggctctaagttattgaagatttataaggaactattcgccactctaatatattagaactacactatacggtctatctataccgtagctgcggtggtagtgtataatccccctataccgacattattatcgttaatagggactaactcgggtcttaactaaaaaagaaaggaaacctagtgaaaaacaaagaagctgaaatcatagacttaataatagaaagaattttcctatgcccacgggatttagaataaaacgtatataaataacgaaaagtatcagatttacgaagacttggatagaggctatagctcttaatcgatcagttcggctataggattatcgggctgttatcttattatagcagctgtgatggtcctaggccaaaaatttctatgaatatatatatctccctgctttaatgattactaagaaagataagtgttaataaatacaggatacttaccctaagcatcgagatcttccgagaattcattaatatacttaaagcttcctaggggtagaatcttcgtagaatgagtgacatcgtgattctaatcatttattacctagtctttaaagataaataccaagccgtaccgttccctatagaggatatagataccgatagtattctctaagaacctaaatggtctaaaaagctatttagtatcttctcttagtttattagagtaaaatggaactaaaaaagcttattttattgtgataaatatatttcgagtcgagggataatcaaaaaccaaaacgattgatcattttttattttttttattttttcaatcatctgttagataaagtctctagataagcaatcactaggcgggataggccagggagttttaaagctaaaaatacgcttaactgattattgggctatatattcgcctaactgcgatcaaataacaagcaaatgtatatagggtggattagaaacaaatcctaaactctgctttcttagtacaaatggacggactaacgaattatacttaaagacttcatataccacgctataatataagcagtctggtattaagtataagcagtctatcaatcgtttttagctgtataaataagctaaaaaggtagattagctgtgggaaagagttaagacttcccgtataatcgctgataagatagtcttacaaaaactataactagtatccctacgctaattattccctactttagccactatcaacaactgtcggtcgatagtcctagatatagtatggcgcaaagcccttagtgctctagaccccttatggcgtatcgaataggataaaccattttaccgcctcttttaagttattaacttcagctagcagtcaccacaggtaatttaatatctaactaataatagcctagtttttttagtaggaacctaatatatatcgcttgtagtaatacagaggatagagttaaaatattagcaaattctctgttgcagtttttcttatacatgatttctataatgatgctattcttatatattataccatacatttgacctactgagctaatggcttagcaggaagataaaagcttgctctatataggctactattatagagctatattcctattagctgcttatattaaatatgtatataccttgattctcttcctcaactatataagttttgaaaagtcggtgtatatatattggcgagtataaatcacactgattatagtggaggaaggtagttattcttcctatactctttacaagtaaattggcacaatgaataccataacaaacgtcactaaggctaagtaagtctgagctcttttcggtatttaggcactgcctgataagcttatatacgaagctttaacagccgctagcgttgatccaaatatcccagatggcttcaaaacgcttatacaaatcggaatatccttgattaatacttcgattgcgaaaattggtcataaggcgtctaagtctactaaaataaggggcatgttaaagaatcagagaagaagaaagccttctaatataatataggattgatatcagcggtatgggccaactataatactattaagagtcgagcctacattgcgtaagggaacggtattaataagttaattaaatacagcacgagtggacacagggctgagaatagtctcgcttcggccgttagcgcccttatagtagtgattgggatagggaccggtagtttagatctagtgttagatagtatgctgcggcttaggtgagttagcttaggccctttatctgaagtgtcattaattctgggacaggtttcttcgggaaggtaagggaaaaatgcttttagaagcttacgagattgccaccgcttaacctatagaagaagacttctaaaggcctagatatcttccaagtgttggcgacatctcactaatccaatcaaatccactatataaaactccacttccatctattctgtctcctgataacagggccattaatagcgttcgagttggtacggagcagatagttctaagctctacaccggatatcactatacctctatcactgacctttagcgataacctggaaacctaggctttgaatgatttagatatacgttctgtgaattattcttgaccctattctctagagggcgaggtcctataagcgataaacgtacctgtccctctagatttagaatatcccctttatagctcttataattgttccttaccgatagttcctatgaccgcttgcctcttattataagatctacctttatatattgaggaacactattaggtaggcctagagcctagcaactaaagtgaagcgattgtttaagttttaaaagagctatatatcagccaagtctctagaaaacggcacagcagtacctaactgagtaatagaccagagaagtgtgtagcgataagtctaaaaatcaagtatagtggctttctagagagggaaagctagaaatgtgaagtaaaagggcaccctttactgtatgaaatatatttctaaagatatatcgagtaaaggcttctaaccacactccgctcttcggacctattaggaaccattctcattcgcattactgatactggtgcttttatctgtctaaaaaatgccctgctaagctctaacttatccttaggagaaatagtattgcgacagatatctaagaaggaccgatacaaaattataaatcgtctcgataggaagtttgctcttaatattcttcttaaacgctaccacctaatagaactttttcgagactgtggagggctttaaagctgtacctctacaaacttggttttttatatagtcgaatccttcctacctaaggctcaaaaaaagggcaacctaaatcacaatgataatactatgattacagagagaatgataagggaggtctttccacaattatcgacagataatcctaagtataaacgaagatatagggcaataacgcgattacaaattattggacgacgatactaaaccctagtaaacaattttgggcagagtataatatacctcttacagccatacttattaataggagagctggacaaaggagtttcagataatatatatgtaccctgcgggattatacctataggtaactaatattttaaaggatctacgacttgaaggaggcggactttaaattgttagtcgaactcctagaggcctcttagggtaagctattacgcgatctttacataaaggcaaatccagtggtagaagagctaatatatggctattaaactcgagcttatagactacggttataagaagttgaaattgaagatatagtgataatccctaaaagatctcccgatctggaactgttacttagctctaaggattctatatataaatatagagtgatagtatgataaagagaagctgaactgcaatttaaggtttttataaactaaggagtatgagttacactatatgtatattaaggaaaaagattattgtccctagtttcctaaactgtttctaggtccgaatgggtaaaagattgttaatttcagctgagctggatcgatgtcaaatatactaggtctgtcaatagtcgattaaggaataagaatattttaataacattttgaatttattttacgataaaagtccgctgtctgcaaacgagttttataagtaacagatataatacgatttacccttctatttaaacctctgatatgactctgcgttaatataactataatataaaggaattttttaattcatatgttcgtcggtcgactatactctaactctaagtcgctatagtgtcaatctaaaaaagtgttaatatatagctcttctcttatgacttacaactgacaaaccgatctagttatgctacctaatccttatctgcttgagagtagtgtctagctttatatccctcacaaagctaacggttatagggacctttgctgtcataggatattagaggcctctctatatagattccgttctattacctgatccagtagacgatcctctcggcatataactagtctaataccggtcggcttagccagtggcaaaatttatagcgttagtagtataccctcgtattatatttctgccctagaaatagacgaatagtgatagcgatcatgttgctggaccatctacgagctctataagctcgattataatatataaagtggcctataacgtttgtatcacgtatattagttgaacttatattatcattattctcgtagaacttatagtaaagatctggttcaactagtaaacttgataccttattataaagatttttgtatatagaccatgtagctataggcttttgtttcttagccggaagcatttgtcgcgtataaagagttaaaaaaattaggaatatttttgctgtttagatataagatttactaaagctcgtagatagtagaaggagagtgtagatttatagtaataattagaatgcggtagttaactctagttctgactgtcgaagatgaagtatttgtataaggggagacagaaatatctcccaattgactattccaaagtaacgttaaaagcctataaatgaaagacctgccttgatatcaacctacttggtcattataaccttaaagtggacgtaatacctgcttttagaaagataaataccttaatcttagaaaacgctcttactagccctagaatcctttgcaataggtagagtgtaattagaattagtaaacgaatctataatatacgtacttttttttcggtacgtagggggtggtcgatccgctgatctatttcccgattgaattaaaatggaattctgtttaaaagactgaaaaaggcaaagcttgtattagaagatctctaatagccggttagtaactataagcgaatgtagtttcacgttaaataaaacgaccttgaatttttgaatagcaaatattcctccctagttctatagtaaggagactgcactctaggtctgatataatcaagacagcctgtagaaagaatgccccctgctatatactctggtatcgaggaggtaatatgtttggaaaggaataggcggtctagtggaatataaatatgtgtatctagtaggctgccccaatatttgttgaaacctaagctacttattctaataatattaactactctatctgtatctctaattcttagtatcactatgaccttaatataatttaagacagaggcgcttgaaggcttatatactcaagagcagttagatcttttggattctatcgataccctccgatcctaaggtattagccactatgtctcctttctatagatcattgtctgcagtgaccaatcttctggaaaaagctctgttcttaaagctatctccggtatctcttttccggtgaaaagtagtctctgtactagatttctaactgaattggttctgtggaagaattcgcaagtaggagtctgggtttctattatcccctattaatcctgtagcgacgcagagtagtattcgcttagcagcttttgtgaatcactcgatgattttaatagtcttacagagttgatagagaacgtaaaggtagtaataggaatctcgatctacagaaaagcgttttcgaatgaccttctgcgagttaaggtctctggcctagatcggctatatcttacaattgttaatcttctgggactaatctacttggaaacacagtagtagtcggtagccgatgtttagttagttcaagatgtggtctaattgtatatacaagagccccgaagtattatccttactatcgtctctgtaaagaatgactttataaaccagatcgttctacgtttagtgtgggatactaatctatctggaatcaggactctaggcgttatctctaagcctaatgtattggtgctaggatctgagagtgaagcttcgtttatatcgcttgctaagaatcaagaggtagagttctgtctaggatagtatgttttgaagaatatagactcggagaaaggtaagtcaagtctacttgaccgaaacgttcgggaatacgagtttttctcctaaggaatttggaaagagcttctgccgttacttataggtgtggactctctaagaacgcgtctgagcggtctacttcttagctagattgtaagcgaactccctagccttattaacgagatcaatgtaaaagtcaagtcttaccagttacagctgcagaaactcggcgacccttgggtaatagtatttgagcaaaggtcgtatcttttgcatataggtcaagctttccagtctcttgttaaagcagccgtagaaggcatatatagcgagcctttctttagggatgtaaaaatagatactggctgctaaaagcgaatctgagtagtcatttagaacttgaataagtaatttacgaagaagatctctctgtgcggctattcacgatatgtcatcacagacaaagatggacgattggtgtctaaatattaaatatcaattatatgagacgaatatatttagtatattgaaatacttcttaagaagataagaggttgagagttgcctggaatatataatcctatgatcgtcaaagatttgttttaagaacagtgtgccctatagggagatattacgtaaagctatattgatagggcttaggtagctgtaagggattttcttcaatatgtagtctgctatatggtagacggggctacctcgaaaaccatttttaataagatagttttactagctctgggaagcttacagtatgccctagaaaaagggagtagagagtttcttatatcgtattaacgaggctatctaattacttacaattactactttactaaaaccctgtaagatacttgagctaatcgccaaaatgaagcgttccgtaaggctttataatcatactttggggctgatatactttcgacctcctaccctgtgggatatactattaatctctggggcctttacaactcccttattcagaaaagcatactagatatgactcgatttacttcagaggaggcactggactgcatgcttatatactataaggtaagacgtgtgacctctatactgttctaaatatcctattaatctcgatactgctgagtataggttatactgaaacgttttgttaataatgtcgctactgaagtgatcgaaataaaactccttaccgttctaccagtactctttacacctattactgtatttgagatgcctgaagacttggtctctaagatcgcaggtgaatcggaagaaagctaaagcctgagggagcagttaaatagaaaattgtggattctgataaagggctctgatatataccggcgttttattagtataagaggacttggtaagggaaataaactcatattaggttatatatatactgatcggactattagatacgaacgataggcctaggtctagggcttaacaggactaggaagcactgtctaagggctcttgcagcttaatcgaactacttgtagaagctgttagtagtggctatgatttagaaagtgtagtcctattgtacagccctacgttattagaaccgactccgtaacccgagtataccatcgagtagcatactatagagccgacgccgctgtctataacctctgtttcaagtataagtggtaagaagaagaataagaaaggaaagactaaagttcaatcttctgtcgagtccctgcttaggtaccctgagtagggataaaaggaatttaaaacttaatctacaatcagtctaattaaatactagccgataagcgatatacgtgttagaggccggtggagcgtatatatttcactcgttttgatagaaaaggttgagctaaatgtcttatcccttctaatataaaatattttgatcttaaagtgagtaaagtgtggctctacagttcgggtccaatgaaaataacgtcgcacattttgcgacgctatcaattctgtatactgccaattgtaatagggtcaatgtccctcgaatatgactaaaatagaagaaatgcgactactattctgtatttacttagactctgattgacggaaggcgcttagacttaaaagccgataatacgtccctttaactttacttactgcttagggtttaactttgtaccgaagaaggggggtaatgtacagataattttgaaataagaattcttattagatatattggtttctaccgtttcagtaaacttagagctcaaaaatgtagacccttaagggtcatttaggtcggatcttgccagtagccctcttatccgaccgtataccactggtgttatagacttaacagtccaccgctttaataagcttagtttaatctatctcttctgttatgtatacttctatctaactaatctaaatacgtagtattataggacctgtatgtggctaaaacattgtaaagtaaatacgtgtattaagggcttgttaataagcggccataggctaactaacgctatacccgcctatagacaggtggaagtaagtcattgcgaatctataggcctcgtaggccgagtcgaggtcgattaatatccctagatgtaatacagaggttttcttaccatcttatctatataatagatatatcaatttattaattctatctcgtaagctatctctagtgccattctgattactcggtgaatttatatacagcccctacttcgattgagctggtcgaatgcaaaccctagactgccctccgttggttcaactatatataggtaatacatacgcttaagattagacctaccaggtatagaagtatttataaggaaccgctcgaaataccatttattagcttaattaaatattgtgatataatagactctgccttcttattcgaagtcattgcttcagtcggcgattgtaagtcacttaagcttactctactataggatggctatatcctagaaccatcctaagggtgaaagtggattcgtaataaagaaaactaactaagaatatccgatcggctcctatattcgggagtcactgtaacattataagtaatccccctgttagtaattacaatttatattataccctatatattaatatctagtactatatccgaactgccggtcgttgctttccagggtatagtacccgggtttatacaattaagcttactctactgccgatagaacgcagtaggatagctttaggtagtattgttatagactgaaacttacctttataaaggatatacttgaatagtgatatactaaatatcgtccagggtatggtaagtttgacaaatatatacttaatactaaaaggatagccgacgtatagtatatagaatccgacgagtctatagcaggagctacttgcgcgcgataggttagaaaataatatcaatagacagagatatacagctagcttaatgacctgcagtttcagtgatatccaaggcgtatacaactctatagatatctattagggttttatagaggaataggtgcttaggatctaaatctactaaatatctgttctaaaggagacatttctgataccgacttgatagctttatatatttcccattggtccgtttccgctcgtttatatatctcgaatacctaagcaatacagagtaggattagatgggatagtatcggacggtatttttggctctttagttagctcggctgtaccttggtataaacggccttatcttctcggttcgtagctagtaccgaaattagcctataggttagaaacgaagggagttttaccttaccttccccttatacgcggatttggactaataatatggctaacggcgaaggtagggctcccctactattaaataagacgaaacatcggtatttcccagtgcctataggaaatattcggctttaaaatatactagatactatctaagaataacgtggggccacctattagacgctactagtccaattcacaagggctattcgttcacaatattcgaataagatacacagtagtataagccattggaatttagggtatatatggcgtagacgcattagtatataacctaagtgaggtacagagtcgattgagagagaaaggcgaaggtaaaggcgattagaactttacattagcttatcatcgatactactaatggtcatttcggggtaatagagtataggatcacatcggtattagggagcccgagtagataatacacttgcacgcttcgacttaagtaacaggaatataacagtaccccctattatacgatccgattcagtaaggcttgaaccactaagacgagtggttataacttaccagtttataaagatcgcagaatttttacttagaacaagtcgattaattagctttatggttatatcttaccgataaagatcacttataatcgtcttcagtaatacagtcaccatttatactatattaatataatattatatctagttcgttatactctctagctgttacttcgaagaagccgcgccggatataccaggtaacttctgagccctaaaggcgcgcgacaaacctacctataataagaaattgtatagttgtaataggataagacctcgcgatatagacggcaaacatcctaccccactattatagtataaaggcggtacagtcgaagggggaagacacaatagagtacatgtcgtagtgacctaggtcttatcttagacctaggataaaaggactccttacaagtatatttcataggtggcgatgggctgctcctatctataatagtataaatattagtaatagtattcgtgttatagagcgcaaaatattgtataaataactagatatagtgtagtagaaggcacgataaatcacttaccttaataggaagaatggacgttttaagcttctatacagcgaatttcgcaatcggatattcgcaccctgttattagcccttttatttaagttatatactttacctagggtatgctgtatggtataaagtgataggataaggtctagtgtatcggctatagctttatatagaatactaatataggtactgtatcctcggggccactctggtacaatatcaatggttccactatcatacatttagcttatagaccggtaatataatatatgactcagatggtcgggtggctaaagctatagacgaagagatggtaaagagctgtagtccttacgcttatacgttatggtcgaatgtccttggttctattaaaattacatcgactttaggatcagtggaactccagaataggttaggctaagatttatatacctatagtgtagatagtagcctttttgccttaggaatatatataaaggcggtacactagattagtacagtcgactagatggaccttattagtagaaaatataactcgggggccggtagaatcttaacgaattctcttacttattaatttgactctaataattaatacgttgaccctagaaaccttaatagcaattctaggaggtaggtgtcccttgggaactctaatctagctcctagggctatatcctagtgttaagaaacaaggcgtgacattaattacccagtctttttaccgctaaaatatataacttttttgactaagcgttttgcttattaattatgtcagaccagtttgttaaatttgggccttagttagagaatcttactatcgtgaattttactaatacgctcaccataccttgatttctgtctaatacccttattatacgatatagacctaattagccccctatggagctagctataattgggataaggaaacgcagttattaaaccctaggttttgtcattatatatgacctttttagtagcctcttgcgatggtaggattagcttattacagtgtatacgtaacttttttcccgattatatatataaaggatatttcagaatagaaaaataaagaatgcttagtaataatagatatatattgccagagtgtttgaccaactaccatcttattaatttaagtgcaatcctaacttcccttcccctagaacttgctagtgttactatttttgttccttagatatatctaaatcattagctttatacgttattttacctattaattatctggcgtttataagagaagcccctagatatttttttttttattcgaactggttagtctagtactccgctggatttatagcagcagtaccttagactcaactatatagtctgagtctgatatagataatgccgttcgtctaagtaaagaaaatttcgatcgtatcctttccaaaagctataataaatggtcgtcctacctaataaatgcttataaaaccccttatctcctaccttcttctatcaatctaaaatcgcttctcgaaagaataccgtctttccttagatatggtctggtgcctaaagatactgaactaccctttacttgtattaaaagggaatcgagcaggggacagtttagtctcctaattactagacaatcaatctagactactttacgtaggcaatgttaccttaaaccgaaaataatagctttagatattctgctagctattcctaatctattaatagtagagatatcaaaatctgcccctctgtaagaatggcctggtattaatggtatctcgaaccatgacaagggaaattatattagcgttttgttccttatataggcttatatcctttctgcgcgataggtagaattactagaatatactttaggatactaatatagtagcaaattcacgcataaggctggtcagcttgcaataggtaccagatactataatataattgaaattgatattagatacgatattaaagctactaaagcagcttggtagagggctatattacactctggcggcggctgggaaataataatagattacaaaaaaaaaatatactacttaccttagtctattattctctctaataaagttaacgtagggatagtaggaggttatctaatctctaaggtaggaccgctgttatctagtactgctttagaatatctagctaggttttactcctgttaccgactctataggcagtgttccatagccctagttactgcgctttatatcctattacttagcggagattccatttcacttcctatcccaaaatcagccttacactatggactatcgtctctattataaaaatccttaaatctagtaaaggaatactctgaatatctttcctattatatgatactgagttataatacatagggtatacgatctttactttccagtaccttctttaacagaaagattaaatgtaaccttattagcgcctagcttaatcctatctttataataataaaccctttagtctagggcgagaagcctcttacactcgctaaggtccttatatatcggcagcctagattagctaacctttggctcagtataattgtagtaggactagtaaaccctataatacaaaatatctagatcgggcttatagccacagactttaatacagcggcttagataggaacgtaccaatcttttataactgtagaacctagtactaataacagttaaatgatctatagggaagacgagtgtcatttactatttattatagcctataatagatatactagaccccctatttatccgtagaaactgtttagagaaactcgacttcttgatactgaaattgtagtatagcaatataccgcttaccgctattactgtttaaagtataaaacctggaattagaatctagtaaatagagaaatgctcgaagactccagtatatctctgatagagtttcgtagggaattcctaataaagaaatataaggaaaactactacccaatataaaataacttaaacttgttttcctaggtagcttcggaggctgtaactcgcagaatttttagttagcttaggtctacagggtatctagtaaataaaaaacctttatatcagtattcctggatcgatattaaaagctccgacgacaacggtgatgatattaattcagatagtggtcaagaggatggttattaatcgtttattagttaatggcttagccgtataaactaaagtatttagatcatcagatcaatccactctttaaagccgttaggcctactagtagggtaagccttgtattttaagtaaatagcctatttcccagagattctatagtcgcctatttagcaaattttctattatttccgataacccgctgctttacatatgtatctattatatatatcattctagtagttatactttgcattcctataggagccagcttaattagaacttgctgttattacaataagggctattaaaggagacggctaaaagtactttttaattagtatcatccgatattatatctctctactttatatctattaattttactaacaattttggccctcgaaagatataatatatagtagatttatagaattgaatatatttaaagatatcgcgtactgaaatgtatattattatactaaaatctgtgcttaaaggtatatagtctacagtatagctgtctatatatccttctagtcgctaaacctaagtataaagacccgtatatccctacggccaattaacatatgtattttcctagtatcatatcataagcgctaaggtgatccgagtagtattagaataaatatagagtaggccagcgctataaaacagcctattatttataatcagaaagggatctgagctttagtatatatataaaatcaaattatagcctatctcagatataggtatggctagacactaggcgtactgctagtcataatgaaggatataggacgcgtctaagactaagataggtaaggataagctaggctgcaatttcctattaggtactaaagctcataatatagttactcctaaaatgaccgattatctataacatttaggtcattttatataccttaaatcatataattaacctaaactcaagagcggtattcagtttatcgtcccactcagcctaactttaattctaaataccataccccaagagcaccttccttataggctaaatactactaggtcacatctattttatatacttcgtatggttattagagtttagggttacctagcttaattctcttccaataaaatagatctcctaggtactcgtttaatatttcatagtacttactagataatcaggttttttacctatcggaattttcccgatagtaatttcgatagttaagagttagagcctctagataaagaggcttaataagaataagcaccttttttaagtggtctatagtactttatttatagcagcggcggaactcaagttaaacctatagtatataaatcacgcgggagggccgccttacgcacagtaacttgacaatttattatgtgacttcgtttccctttctcgtcctatatggtataagctagttattacctctaaaggggttctaggtattcgcagaagcatctgcgcccctcaaccctaagtaggctagagatagactttaataaccccgataatcctagactcctagcagttactatcctattaatatcttcctataattttatactatattaccgcctctaagagaagcgaactaacgtagtgctattatatctaatagattatatccaggatacacgtggtttctattagcgccaaggtattatagagtggtgaacttagtacctaccagacaggtaaggctactagttacagcaagcatataattaccgggattctacctaatctatagctttaatagtattaaataatagcctagagtgcagtctatatagataatcctataggtagctaaattatcactttatactttacatttagtattattattagtattacctatagggtccttttacctatctcttccttttctaatctcctattcggtaaataagagtcctacagggatatctaaaggttctatacaaactagacaaagagtatatataaggtaaggctagattatacaagtatgtattgtctaaacctatacggggtaatatataggacttatactgattaaatatctcgagggacttaatctaaatcttatttaccttagctattataatattactaactaagtaaagtaacaataggttctatttggatcgcagatatatctcgcctagagttgacagatattaagaagatccggccatctatcacgaatgtagagcatttgtcttcttataattagatcgaatcgtctagccctactattactatccctagctgcctacctctgtggtctctactctaaacccctaaaaaagtggctaaagactttaggctcatttatattgcttaaaacgcgtttcgctatcctgaaagtccgcttgaaccactttttcgcttactgtacactaaaaagcctttatataatatatatcaagttgacttaataactgatcgaaataacgtccgcaaacttctgtcgttcgttaatccaaatctctctagaaatggactagaacctttcactattaaaattaagaccacaagcaatacagcaatattttgccaggtagaaaccgaaatatatatatttatcgggccataccacttcagaggctatggtcacgagtttgagaaagcgttcataaatacctaagtatccggcagcactagatatcatcggattatctcctataacttaggcgatttgaaattcatagtacactacgagactgacgcttatattgaagaagctgcaaatcttcaatcttaaggtatgggttcggaaaataagaattttctgaatatgatggaaaatctatctctttcgcgacccgaaacttactctcgtcttattaccgagtccaaattagtggtttagaaaaaaggaaaatctgtcctaattaatttaacccttaagatcaaaacacaagtgtcctataagccgtttaatatctaagaagttcttccacagctataggtgttataaatacccaaccttatccatgcctaccacaatggtagtacatttagactgccggaggttaaagatgtcactcgtgagattgctgaataggaacgaaactatactaataacctttagagattggttgtattagtcaagggaatcattagagtagtaagagagaatggtaggaatactgtcataaaatataacggtcgaagtgacagccttacagttttaaagagagaagggagtaggatattacctgatgatctttatttgaaacttagcgacaaaataggttcgactaaagcggttaaatcaaattctcacaaaacaatactcgaaattagggatactttctataatattaatatctcgacgatactatatttatcagcctttgttagcttttaatatctttcccagccacaaaaaactgaattcatttatagtaatattgctttatttaacattgctctcaggggcttagaatcaggctatcggcaatattttcgctctttataaggcgatatcccttaatattacactctctgtgaaacatatgatttcctcggggttaacgtacttaccaggcagtcaattaataatatttttgctgatttaagggcctgtaaaaccgattataaactcgggtataagcgttattaagctgtaaggggcgataaatctcgagtataggacgcggcatttcgacttctatttctaataatatacagcgaattcagcgataaaaaaaaagatcctaccaaggtttacaacgccgtgctatttattgtctcgtatccaggtaccttcaaacagggcacgagaattgcaatacagtcggtctttgaggagcgctttgtcgtgtccgcgaagcaacgaagccaattggatcgtcggtaaaaggagaatactaccaactcgtcaggcgatgagaacacaacagaggatgaatctaataagccatacctttctaaccagtcttaggctaacaaaatttatgagaatggtttctttagctaggttgctaggtatctttggaagctatagtagtgtatctaggatttattttctaggtattaagtctaatgagcgggaggtcaaacgtaccttcaagtatgaattcttctgcagagttctcttctttttgtaccgatattagtagttttcgtatccaattatacctttatactcttacgacttaattctaggagaataaatccgacggtctcgtgactcttaattagatggttaataaagccactgtatttcagaccgctttctagactagtagtggtatcttacaatatattgtagttcagaggtatattaattgtgttttattctagagaaaaagatgaggttatatatacaacacggagcccagttgattataaatcaacttagttatctatatagacatttcggagctaattccgataaagcggcttgcttcctaatctgtaccagagtcttctttcgaacgtgacttgtcaatagcttcagctgcacattcgatttcgtatattatcgagggtctccacttaagataataatagatactatagtccattttaacagttattatcgcgatttagcacttctggttttaatttaggatcgcgatttatatagaaaaatctagactattcatggcaaacaacacagcgtatatattgctgggaaactatataagtacttatatgccgaaatcttatcccgatacttatattattaccagtaatattacactctcgcatataatagtttctagaataattaaatctatcagtagcactcacttaagtgctactagtccggtaagtcccgtggctatcggagactaaccagattaagggctcccagctaggtgcccctaagtcggttagcgctcttcgcaggtaataagattctttacgtgatcagaggacagatagatcggttagctgttattagttacagccctgtatttaattggcgactaaggcctctagtcccacgcagtgtggtctctagtatgacagaccctgtcggacgagtgagggccatgccctccgttccccagctaatccaaatcggctttatatatacagcgggccgccgtttaagataattaattaacccatctattcctcctcttctaccgtttttctatctctcatagaaacataatctaatctctttatcctaaataatgaccgaagacacgatcgccgttacttgaatatttccttatttttatttcagttcggtcttttcttactacaggaggatcttgatatccgttaccactatttgtagtaataccaatttaaattaatcttctatttttagtcctaggagctggctggggtttagcgtgaccatagtaccacagagtaccgtggagttctcgggcagtcgaatatacaacaaatttcaatgagtatatatttttcggtctctcagtatacagttgtggaagaaaatattacctaggtacataagcccttaaatcgactagcccagggctccctacttcacttttgagttggttgtatctataaaaggtagccatgaaaggtagccattttggataggcttattagcagaaggcactctagacaaagagaataccattgacgttagatatataattaagggactcttattctagtggcctactttaagttaggaggttcattaaagatcttcttatatatctcagtaagaatgcgagtatcggcgcgaaaggttggagatatgttttcgctttaaataagaaagcctatagtgcggacgaggaggcgcttaagttactctagctcgataagctcctttagacctaatataaaacttgcagatagaacgagtatattgccgaattgcctataaagaaaacatataagtctttcctctatattcgtgatttttaagactagggccagaggatcccttacatataggcagtcccgaagatattggtaacgaccaaccgatatcctcctactctatcaaatgcctccgtgctcttaatagccgaactaatgcagatatagtatatagattttagcttcttcggcagctcatgtaatcggaccttaggtggctgctagttagtagagattacagccggcgtagagcctatatcactcgatatactcggagcgcgagcggagctgtgtagtatagaggggggtaattgttggaatacaggtgattccattaaattctggctaattggaccggcgcgagtacctatatggccgtagtgcagtatataatagagaaggggtcggtagataatataccgggtactataatacttagcacacatacaggcagcgttgatttcgtttactggcggatcactttcgtcctattacatactattaggtagactttcacgctagcggtcgaggtttaggctaagagcttcttaaacggtaaacgaccattgtatctagtcttacttttcaaccttatataagtctgtatatactcgatttaagattttgcgtagatggatttgggtagaataaaacagtattattatcgtctctggtacagtgagattatttggtagaaacatcgtctattttcctttcggaataggtatctaaccttccgaacgggagatattactcgctggaatatcgagctctacaagaaggtcactctccaattgcagataggtctagtacacaaaattgtacaagtccttcatagctcccttattaagttgcctataccgcttagttcttataagaatctagtaagccctcaatgcctaagaaatctaactgtggctctggaaagggtaggccaactggcctatataaagtccagcaagtaagccgcactgaatatattctagcttatttctaccctgcagatggcctagtattacagttatatatctatagagagttaatctagggatagcctagtagttccttgtattcccttatttatcctgtgtatttgtgatatctctccttaataagccttctatatgattgttggatgaactgtttaggaaagcttggccgataggctgggctggtacactatagagaggattcgaaagcgacgtctgtacggccgctaagccagagtttacagagggaagcataccattagtatccgtgacgtatatcgtaattgcaggcagcggagaattgaatggtgccagcggagcagggatatattggttgaggtagtcaatcttcttatctataacaggcctagggagaggggcaggagcttcgcaaatggccccgagggctaggtatagcaggattaaggcagtgttaatgtttttaccgactcgtggccgtagcaggttggagacaggctctaataactcgccgcgcacactcaggttttcatttgactgcctctttttggctagaggcggactattacgagccggttgagcgtagctggaaacagagcttggtggtgagttattgactcgataatagctttcgataaagttatcgaccttaatcccaagttcaccttccataaggaatgggtagagcttgaacatatgcttgaagtagctatcatagtagcgcctagcagtcgtagcatccagatccaagtttccaaattcgtcgatgtcaatattgacgtgctgtcctgcaccgttcacaccgggttgagcacctttagactcgcaatccattggtaattgactgttatcggcagtgtatgagatctcgccttggccgtatatactgatgagactgtgctcttcttccaaccgcatgacatagtcctcatcatatctttcagggtgtatcagcctcttgattgacagccacattaatagcttgtgagctgcagtggtgtgctctactgggatggagagctctccctcggcctccttctaatgcgttcaattatgttctttctaaattcaaaagtgattcctgtgtggacgaggccgtgcctagtgatattgctatctacgcgaagaaaaattatctttataaatacatcatttccgttccgtgtaaagctgtcatgtggagaatgttcgtatcaaatagtgtatgcggcctttttcgcaaatgccggcaagtcagctcttcaaatccaagcttctggcggtacctggggtccacggctccaagctgttggccaaatttcgaaccgctcacatcctgggtctgaggcatcgctgctttgagaggtgagtcctgcctgatgactggtgatggtgggagggccggatgttcttgcacagtcggatgtgtatgtctaacctcttcagctaggttgaaacccacttgctcttgcatttgatcttgccattttgcaaaatgctcatcgatgcggttggctcgctcctccatgcgagtctctatctgggagagtcgatccaataccagctgagtagtcttctcttctttgtgcaacggcacctctttgtagacacagccaaggttgtttactttgcagtggctgcaacatggtcgtccctcgtcacactttgcttttcgagctcgacattgatcgcaagcctatatggttagagtgtacgtgggaaaatctcccgaaacaagccctccttctactagcttaacatacctgcgtagctcgatgtgccttcctttgaggtgctttaagcacctctctttcgtaagaaccctgactgtacccgacatggggcgtatcttttgccatttgggtaacacgaattgtggaatctgagacaggaggcagacttctcgaaacggataaatgttcagcgttgttgacccgatttaggagcgggtagcccatgtgagcgcgaaacccaggtgagccctcgtacggcgcgccctttgttgactgttggaagttttggtaaggaactggaacttgggcagaatctgtgggcgcaggtataggtaggccatgttcattcagtcgaccatacatgctttctgatggaacttcacggttacgcataaaggggtatcttggtcgctgcagcggactcataggcgcatggtgcccttccggagaggaaatgcgatccattgcaaatggagagtccaggtgtgtggaggtgtttgaagctgccaggtacggccgttttgttgtattgttgcaactaaccagggcccttgacatggggtatgtcttgggcgtttactgttgcgaattaatctctcttcgtaaattgggactcaaaccgacgtgacacttttggttggaatcagaaaagatatagtcaatgagaggaaatcagtggattagttgtgggtgtaaactcggcaggagtctctttcctgaccaggtggtccgaggcttccttcctcacatccttggctacactggctgggctttactactggtgggtgccatccctggctgcttagccaattaccatacccgtaggtacgggggttgatcccgctatatgaaccgcacattctccatccacactttatttgctgcacaagctcgcaacaattgtcaatgtgacaggttgaaatatgaactggtagcttgctatggagcgggggatcctagctttgagggcgtgcccggtagggcatggtttaaattttgtaccacccttagtgaccatgaaatcgaccaagaatagttgataataagcggcgaagccgagaatcaaccccaaaaagacatttccagttcttaaccaaagtcactttaattccagtatggagaacaactcaaagcggaagtattgctatcgtggattggatgtaggtaaacgttttggcggtcgtgttgttttgggaacccatccccgggaggagggtataaaatctgaaccataccgtatagggaaatctcccaatgccagaatcacttgccccttttgtgagctacagattccagttcatcagttttacatgaccataattcattgagtgtttttcacgaatagcaatggaagggaaatccgggtttcctgggaagtatctaacggtggccaactaccattggacagcttggaggggattcgcttcatatcgagggtagtcctgtctgatccattgaacttgccgatcgtaacatatatttgactccgaaagttcatatcccttgtgatatcccctcccagaatgatcaacccgactggctccagcatccgcgttccattccgcaccattctcgaccatcccataacacagcaatactaacttgaggcccccaatcggatccacgggctcatacgtagaatccttcgcggagcttaaggctctgaattacatatattcactctttctgccgcagaaatattccaaaaactcgtccctactcatatcgccgttcacaaacttggcgcccgggctaatattgccgtagcctgcgcgaacgggggccttctcttctgcgccatcttgtgtatttcgatcctataaggatgagtaccttgatgggacaggtaaataatccgggaaacgttaacatacggtgccgacgccctcgtcgggcgattcaggtcccccaagaaccggtgtactgtccatctgcttcgcccgttctctaggtttgaacaccgtcgatgtatttctgtcgtttaaacttgatctgtcgtcgaaggtacaatgggatcgaacgtatggtggtgtggcctatgggccttgctattagaggtcacatttgtggaaagtattaattgtgagccgtggaagtacctgaattggttttgtccttatcgactgattaaccttagagactggataagaagactagcgatattacctctcagtaagtaactctacacgactgacaatgatagatctggcagggccatactctatgatcctgatttggtagcgattgcgcggtcccttccctaggttttggtgcctcccgatcggagtgttgattagtccgatgaggcaactctttctttaagtaagtgatagccataatatggatagtgctctctgaaacgagaatagtctgagtatttagcgctgataccgtttaacggaagaattatgaagaaggtggaggtgaaaggagaccagccccttttggatctagtttagcactataataatccaccggtgtgacgtaataacattgtcatgaaactttcagtaaatttactgggtgggcctatatggaaagagctagctgctggggcgtcaatatgaccgtcagcgtaaaagactcaggccgatgcctacgggccttccagctatcgggagccagtggccaataatggctaagccatcatgcgctcaccctaaataaacgaatgatggatctaacgaataaattgtatctatggtgcgattctaaacaagaaatgaggtggactcgggaaggtgaaagtaacaattttcctacctgtggcatttattgcgtatgctagactccaaccgtaagggtggtatacctaccgtttgtatgcacacagaaacagctactaaactggccaggtcatagtgggctaaggaggtgggtaaagagaaggttcagattaaaaactgaggtcggtctgggtcacatcggaataacgacgtgaggcaagagcgcctatcatgatctactagacccttgcaagcctggttcctagaatccttccgcgaggtaaatgtagccaatgcgtgctcaaagccataagccagatttgtgtcatgtataggaaaacagactaccccttgggatctgcgcgcgcattctgcccttaaggtagcaagcaaccttattcctacttattaagcctgctctatgaacctctataagggtaactcaaccttatgagctactgacattttaggttggttcgttattgtagcattatgtcttatgcgcgaaacccatttaatgtcactggcttcgtgttcacggaagtcccaataaactattccattggcccgacatataatccactaccttcggagataggttcaggaagttctctccatccgagcgttctacaatcggaaagctggttaataggatctgtgtcttcaaccgtgactccctctccccggtcaagttcgtcatatcgagaaataagacctcggccagcaccagcattgcctcaaccggaaaccaaaaatgaagagaagcaacgagtccggaggcctaccaaaaagacatgtcgaagggtatatgggcttactggcacgcctaaccaaccagcccggcgtaatgaaacgaggtctgcatggctggttccccgaacattcgtcacattggctaagtaggctctttcagcgcagcaaaaacaccggccatgacgagtcacgattcagccactcagccccagagctctcgctcatgcgattaccctccatataatcaagaaagccctccccaagcttccgtcgaggctctctagaaagccttgaaggcttaagtcttacactcactcagggttttgcgcaagattgctatggaccaccaagcacttaacctggtccctgagataatagatggttgggtggcggatattgaaggagttgatgcaaaaaatatcccaattgcatccagcatggcggcgcagatgtctgttccgttcgaacgatttaccattctcacgaaatgcatcacagctacgggcccgatgcaacagcttactatcaggcaccaggcaaccgagttgctgaaatatatattgacttatgcggaggagtactacttagtccagggttcacaggtctatcttgatattggtagatggatagaaagactcaccaagacaaacatgaggaagtgaaatgttattatccagagggtctggaatattccattgctctttctatggaattatgtgtaggatgttatcttcttcttgtaccagatcccttttcaatattatgggaatatgttctgtaatgtcacatatccgagagtcccagtgccgctatccccgtattagaccggtgaaagcttctgtcctttccctgagatgggtgtcaagggagtattccaatgttttaccgattgctcacctcggtacttccatcgtcctttgcgacacagaatgaatatcatcatgtccagctagtattattccagtgttatgggtgtcttgttggttccatcattgtggtcgctagctggttgggatgcacgggtgcgttgagaagtttcttgtaaaaccgatccctaaggcctcctctgggctttgggaactggagtataattgctccataggtgcatcattggtacctcttcatcatgtggcacacgggattggaccgattctttgacggaaagatcctgcaggaaaaacgtaaatcattagcctatggcttccactgcgaataatgattccgaggttcaacagagggtttgtgttactacctctatgaaaatcctgttattgcatccgtggctttttgaaacggccgcctcctgtttgtttgaccaaaatcgacagcggatagggaacaaatcttcgtctacaaaaagtcatcagcaagccctaaagttgtgcgactgggcctacaaccactgaatggatgtgggaaaggggaaggggaaaggggatgctggagggggaggcgcggtgaataggaagccgacatttcttgggcacatcttcgatctagacgggatgcttaatctattaacccacggtgagccatttgtcagtatttcattctcttgctgcacggtgaagatgcagtagcataagagtatctgagaagttgcgttgctcacttgcctgtgatattattcgtgcacggccgttgatgggaaatgtcaaaaagggctttcgattatgtatttgtctgcccgtataaacaaattagttcaatttcctctagttggatacctgttgttgagtcctgggtgcgaggcgtgagcttgaggagtgaagagatgaaccgctgactgtcagttttaggtaagtcagactcacctaggccacctactttccacccttcctagagcatccgaccatcctagccctgcttgcctcatgccaccattagtcctcctaccatcagatacaatccatccccggttgcaatgtcacttctgcacagtttctcttctgctatgctcaaacttactgaatcatccaacttccccccgactaaagctcttcgcacctgagtcggaaacgtcttagccatcaagatatgacatcttactccgaactttggctggactggtttggaatttatcgtttgattgcaatttgctggtccaaatgataattgtcaggcccatcgaactactgacctctcccatctatctcttagtcaaacgatcgcttgtctttgctcgaccaagatgccgtatagcacaagggtcagcacactaccccaatgttatatgcttcgaacaaagggatcctctacacgactggtgagatggtttggtgtgtcttgaaggcgctagtcagacctccggccagaagccctgcggctccagtgggagattgctcgcgcgcgttgctgatccaagataagttgaggtaagccccctctgtttaatctgtcacatatcgtaccatactctgactctatctcttctgctcaaaaggatgtcgctgaataccctcagctggaatctacgcctatccaatcttcaatcacggtctatgattcttgcccgcagaatatccataccccacaaagcccgttcctttatcctcctactgcgctgggtggtagagccactccgcgatgatacgactgaaaaatcgaaggggagggcgaagggctaaatcgccaacctctcgaaacacgtcattccagaggttgatcttccaaggtccaccgtggacttagctaactatggtactatgggagaagtaccctatcacacactgcacgaagatggtaacaaaagcattgacggggaagctgaagagtttattccatggctaaaccgagatttgggcagagccacagatatccgacatgttgctggtaagccagaaagcacattttctcatgtcgatattgtcaactccttcaaatgtgcatcccgaggcattcctctgacctgactgctttggttttcatatctctcttctccatatcaccatttgacttatgtgaccttgctgacggagttttagttaggcacttcatagctgtcagtccgggttaggccgatagctatcctgggttagggataaatgccataaattgaatactacccgactgtgcggctagatgatgcaattatctgccatatactgaaaactaggatatttcttcggaacgcaaaagacccgaagacagaatattgtgttcttatggtgagcggaaatcatcacaacaaggacaagtttcaatttgctacaacatctccctatgctgagctgactttgcatcctcacccacctcatgttcctgacgctagggccgaccatgaggtacacgcttcacacactctctcgtccagcaacgctatattccagaaaacttgacttcactatcaatcgattgatccccagtgtagattttctgtgacacattttattggcgccacgaagatctgccgcatttttgcacctctcaaggaagcgctcactggccgcagtgcgaggtacagtactgcagggataaggaattaggtggacacctggccatggtcctcacgctgggagctggttgtagtttggaacagccgaaatagcgactgttccaccgactcgccgcgctgtttaaactcgcgaatatgaggctggaggaacggaataccgggatgctgattgtagcgctggcggtatgaaacgaaattgtggctcgggtctatgagaggcaggattttgggcggtatcaaatgggcaggagtaacagtacgactggcggcgaaatcacggaatatattagatccgatcgcaatatatttgcgaaggccgtctagtatagccattagagaataatagttccgtgcttcataaagctcctgtgagaaaacaaattaagcttcagtttcttggtatgttcaatagttggagtcctcaccaatgtacaggcctgaaggtacggaactaggtgtggcagtccagagcagcattccaacacagaattgcttagcctttgccaatagatgagggcctccgaaagcatagcatcctcttctatatgtgttcctcgtgacagcccatcaaataaacacttatccgtctgcgtcaaggcccctgcgaaatcggtcgctgatgaagaaaggcagtcttccaacaaaggaagagaagtttcgaagggctcgaaccaattcatctggtcagagtgtctgtatgctttctggaaacgtacagcaaggacactgagaaccttgaatatagttgataggctggaggaatggtttttgaacagttgctgaattggggctgcgatgaatgcaaatcctggggtatcatgcgaaggcatatcgtgcttgccctctggctgaatggccatgatacactgggaaaaggcgtgatgtgcaaacggacttcgagcccgaagatgctatgtgaaccaattagctagtttcccttgatcttggtctttctttgtgggcttaatggatcacccaccttctctattttcagataaagcaaaagttcctccgggtacatgcgtagatgatctacaagaagagcatataacgaagtatgctgctgcaagaaccactctactgacacggctttgtatccaagagcggagcgtacgatatcctcaaaagcgatctgctggaaatgaaaataactctctgcctcaatttctagagcgattgatctggggtccgatgaaccccctgatatagtgggaatccagttccatgtaagtaatggacgttgcgggatactagatcgaagcaggatctcttccactttctgcagatgtggcaactctgataggcggcaatgatcgtacggctttgacgccgcaaagaggcattcattgatgaactgcatattacgactcagcagtgagcttcgcggagaagattcgtcgtggaatagcccaaatcggatcgcttgactgatatcattgaaatcgtaagcccatagcatattgattgcctcatcttcccaccatcgatatgcgacgcaaaattgaggaatcgccacactaggacgaaagacaaacgggaatggccccatatccacgggaggagcgctgcttgttgggttttgcatcatttgagacaaagtcggcagcactgagttggtgatatcctggaggtgggggatatgtcggcagacccaggacagagagagttccatccatctatctaaattttaatttaccgctagtcaccttctgtgtaggagtggtctgtatcggaaataccgtcgacgaccacacttgggcctggttgtagcgttttgacaatatggcgagacgggagggggacggggagttagccaaggcaaagcccacgccccaaagttagctagcatgccgtgttgaaccaatattccaaatagttgccctcatatctggttcccattagcacattggggatggtatgaaatctgaaccatacccgattgggaatatcctccaagccagaattcctccgccccttgcgacctttgatttttctcaagcaccataattccttgcatctgggtttcacgtattataatagaagggaaactcaagattgttggataggtattttgcccgcagcatgtcgagatctaggaccgatacgctttgcccgccccacgaggggtgttatcaagtgacttgcaggcctatgtgaaaaccgaaaatttgtaccaactgtgtgcctgtatctaaattgacaagtgggtttagtccgcgcctaaggaatgtaggatttcatgtggagttgatagggttgtgttattcctggtgtagaccatggagatgctggtgagaaaaacatggatattagggggctcaacggttagttactaaaaccaacgaatgggaaaagcggcccacgtattattatgttgagattgtcaaggcattcatgttgttgagcattttgggtcccactgttattgttataaggcctcttaaagtgaatatcttgacaccatttggatcataaggtagcctgtatttccgcacattttggaagcatagccattacgtcattcaacatgtcagggaatcattcatacaaagtcaacgttagtggcacgctcatgggaaataatggctgatttctctgcgggcggtcgattttgagataccctctgttattgtaaaagctctggggcagtggctacttcatcaacccagggaagatcttcgaaggtatccgcaaacatgaacactagacctggaatgcactttctttgtcctggattgaatatcgctacccagggcttaatcttggctaacgtggtgatcaacgcgcatgcaaattacgatgttgaagtatatcaaagcagccctcagggtgctgatggtcagtttggttaatttagatctcacttcctctagcgagggccatgacatatgcctccatgtggatcattcaagcggttcttctttttctagcttttaaaacacgtagacttccgcgagcatcatcacagctagcgctaggccgcttcctcagccatactttcccaaagcaccggggctagaaatttacacagtcatgcgaacatctccttttgaaagacctcgtaatggcgctaagtgggctccatttggctcgtaattggatgcaagcaggggttggtatgtgaccttgtaatattgaaccttgggttatgcactagactggttgcgttggaaaagacatgttctgtaggcggagcgaatgttcgggccaaagattcgaggtcgatccgggcaacatcggaacatccggtttaggcaaaagccctcctatcggatatccactggccccttacgagattgtcccccgatgtctcacttgcgatgggcacatttaataccgcattacaagccagaaggaagaatctatttcctgcgaaagaacacagataacgccttcgaattctttcgacgtgaaggcagaatataaactacttcctactcgtcaggtgtgttgcgtggaattgctcacaggtaaccaaactcttggcctacttggggaatcaagactctaaccaaacttatgattgcgacagtatgtaccatgacggaaactcatccagtgggagctcaacctacccactcgtgggagtcccaatagactacccgtatggcctgacacccgctccgttgatggactcggctcctgcagtagaccaagcgagtgatgtttgttggagctttgagcaagcacaaaactggacgataacacgtgcgtcgccaacagtcacactgtctcccctccctatttcgagatatcgagagataagacctcgaccgctgcacgaatcagcgtccactttgcctccggtgcagcctggcaaagaagaacagcacagccagtaccggaaattggggagaagaaagcactcgaagagccacagacagtcagatcaaggatacctcaagaagacagccaggagcgcgattcgaacggcatctgaggttacggatacgaccaagaagcaagtgagagttggcagaatgaggtatgtacggctgcactctctaactggtaacccgggaaatggctaagtcgcctattacagcagagcgaaacccccgaaagctccagggggagattcagccacacaaggcccacgccgtcggtcgcctgattgctcttcaaatcatccggaggatagcccccaagcttcagtaggggctcttcagagagccttgaaggcccaggtattacaatcactcgaggttttgcgtgagatcgccaaggagttccgcgccttcaacttggggcttgagacgattgatgactgggtggcagagatcaaggaagttgacgaaacattgatccccgtcccatcaagcaccgcggtcttacaggtacatgttcctttcgaaaagctaagctttatcctcacgaaatgtattacagcttcaggacgcatgcgagactttattgtcagggaccaggcactggagttgttgaaatatatacagacctatgcggaggagtatcacctgtttaaaaacctgcgggtccatcttgacattggtaggtatatagaaagactcagccaaggcaaagataatgagatgggcaaatgatgttgttctcccgggaggtcgcgcatagtcttttgctgtataccagtcattttctgcctaatttgcttcaaaattgagaagatctctctggagtgttcattgcatgtcacatactgaagatgcttaatgccgttctgtcagtaatgaagactctaccgcagccattctgctgttccagaccttcccaccacctgccttttgatgtacaggatacatatcgcgcagtccaacaactctaggcccaggagcatgcttgtatataattgctccgtcgtggctgcccgcaatctttgggaatgcggaggccttcaaccttgctttcgcatcccaaatactaccatgccgatgaacatgagtatacttgttgctcggtttcgttgttcgtatggtagagggtctgttaagccggtccgattcgctcacgtaaataacctgctagaattccaagaccattagctcgaggctttcactttaggtacgcactgagagactcgacagactggtttcgttatgtcttcattggacaggttccacctcatctggcgctcggtatagggccctcttgtgcacgtttggcaattgggtagaaagacatctcgtcgtgtacagataataagtccggcaaagcttggagatatgtaagaaatggcaagcaagactcggggaataataggaagagaacgtgccttgagagttttcactcaccgtcaatcaagaaaattcttgatttcctcctccacagcaagccttgtatcaggattatatttgctggctgtacaggcaagtcgtagtagcctaaaaggatcccagaagttcctcgcttgcataggatgtggtccgtggacggcagatgctgaatggtgctttctgttagcatgtggactcttcaaaggaacaaaaggtctcgatctgttagggttgtgataagttgttgaatactccagggaatgcgaggaaggaaggtcggggaaaggagaaatgtatcactgactgtctgttttaggtaaggcagatttgggtcctctgccctccaccttaccctgacgcgagcacctgagtattctggccttccttgtctccttccaccaccagttccccctaattagataaaatccatgcccgtgttacaatttcactttctctcggtatccttcccggtaagtgcgaactcaccgaatcctccaaacctgtacctaccaagggtcttcgggctcaagcctgaaggctacccacctcgatcctttgctaccaaacgttcctaaggctgattcgaatcgcaatctagtattgtactaccctagttcgaacaatagcaatcttcagaccgaccagactcctgcctcccccatccatccttccgtcacacgaacgtcgcgcatgattgctcgactttgttcgaccaaactcctgtataaggctagtttcagcacacgatatcaacataccgttctttacttctccaccaccggtgcggattattgcgtgagctctaagggctagtctgaccaggtcagaagcgcagcgaccgcggcgtaacaactctcgagcatttttgctttaaggtgagacgtcggaacaagctgtcgcatactggacactggttccatctcttcttatcaaaagacagtccctaaatacccttggccgaatgctacactagtcaaacctgccaggtgcgtatggccgtttatgagatgtcctcgcagcaaacgaccgctagtaacgacttcacacagggagacaatagacgataaacgctttaaacttgtctggagcctagggataattcgtcttcatgttaggcaaaaattacagacagtcttagattgtgataagaggtgggaaattcatacattcagtttccggaacaagctcaaacaattgagcttatattaatcgccggagtaacatatatatagggcattcagacacgactaagcccatcctctgtcctcttactcaatccgggtcacctgctcgttttgcgtacttgcctgtcatttggcagtggtttctcgatgacacaacggagaaactggaagaccctaacatcggctgccttgcaaacgccctattttgccggattttccttccatgacttaacaactctgatacggcaagattattgatgatacgaaggatggtctacattgcatatcatgcagaaaccatgttttctttcaacaatctggataatctatgctttgctgatactaaagacaatgacagcggaatcatgccactggatatggaacaagaatacgttaatgattttgatgctgaccgggagatcttgggaggcggctcctaattttggtacatatctggtgtcctgcagtctgctttaaagtatattagagcaacacagagacagctgcatgaacctttgtttcccataaagactacttccgtttcccagaaaattctcttaagaatgtttctgtatccatccctccgtgaacacaaaaggttcgtccagtgttggaattatggaagaccatcgtatcatccatagaacctgcacatccggtaatcaccatgcttgcgccatcaaaagtgcagtctttgaagatatacgtcctttgctttcttttattgatatcggttggttcctcacgagggaagacggtggctgatgcaagtcaatacccgagtcatattctcaaatgacgcatcatagatacctgagtgtctctgttcatcagaactggaatgacgatgactggatagctttccttcgtgcttgaatggttgcttgagtggaaaggaagaagggttagtaaaagctgctgtaagagcgaaggcactctcgcccgagctttagtttcagacttacctgatcccgaatacacttcatggatgtcgacattggctttctggtatcatcctgatagctttggggctggggcttgtagatctgttagaaacagtaatctctggaaaaggaaagcctagcgcaagggtatgataccaattctattctctccagatgtggccgggtagacccattgagccatgtcgaagtatcatctgaatcggggttgccttgagataatgcaccttgacagccgcctttcaaccatctgatggtcatcttggaagttggggctttccagaaatatcgtaaagaccccctggaatgagacaatgaagtgaagtcagaatgtgagggggaacggatcagccatgacctagacggtaaattacccctagtaatgtctacgtactgtatggcttggcactccatgccctaaatgatggtaatatttctccgtaggtatccagcgttggcacatatgccatacggctggccgtggaaagaagtgcggatgtatcaggttgagggagggccctgggaagatcagccactaaggccttttttatggtagcggtataattcagaccttgaccccgacatcagctgcgcctacctcggaccaagtacagtatcatagtttggttcacctactcttgcgtccaatggaaatgagagcatgagaggaagagtagttagaggaccacgctagtacaatggcccgagagtgagaagaagcgccacaaccctttccccaaacccctcgataaacctactcccaggaaaaatgcgacgatcatttctattactacccaccataaatatattgttcattatgaaagaagaacctgaggtggtgttgtccccaaatacttggggaagctcccgggtccatcggaaaacctgcactctggatcaaatgggtacttgaaatcaggtcacattcggtcaggagactacagtaacacaagctcatgtgcctcaccacattacatttcggataacccccagtggtggacgacatattctcgaggcttgctatcaaaaatacgacttcatctacaaagacctccgtcagcaacctttttggcagcaccacacgcgccctcccgctttcctccaacttcgcccctccaatatcacgcgaaatgacctgcacccaataaatacggacccactgcggaaggcgccgaggagacactgcactgcaatataagtcttggaaacgtcgaataagtgaaatgtcctggaagagccaacggctaccacaagtgcgaggtggtgattcaaagtcggcccagctaggggcggtgtcaacatggtcttttcagctagatccgggagagaagggcagtatttccgagttgcttggtatgtactgtaattctgacacaacgaccataatatcagctccatccttcagcaaaatacggattccgacctcgtctttagcagtcaagaaccttcctttgccgcttgaccattcccaccttcaagcaacctcgcaagtccggcgatgaatcgcgcgctccaaatgggccactgatgctgttgaagcgcttttttccctttggccaacccatcgccacgacgtgcagtcctccttttatttgcacaataaccagttcacatgtacgagtgcggccctgagttagcggtacgtaaatttcaacagaggcagtttatatttgtttcgccgcacatgttgaaatagcccaagttctgtagtcactgagcattgtatagggttacccggtgaatggccttcgatccatgaaaggcaaggcctcaaggttcagagatggattttggatcataagcgccaccgtgtcgccgtcattgtccgaatgaggaacgacagctcgaacagctgcggtcacgacatagtttgtatgaatgatataacacgaatcgctcccgaggcccagggttctcctaccactaatagctgatattaatataaggatccccatcactgccatgctatagcaccatgcaaaatcgctggataccaattatagcaatacttttccaggtaaagtgatctatagacatgaaccattagatctattgccttctcacgttagatgaagttggatgcgtatacaatatgagtatgaacgctatatattattgaacgagaagtctttagctctgttgcctcctcataaaccaaccattcatggcccaacactaggaatcctgcccagaattttcatcatatttggaccaagagcgcattgtgttcaaatctttgagccattcttgcctgaggatcacgtgtttgtgccagataaacagctttttctcttccttggatattgtgcgggatggggacattgtttccttgcactaatgagcggaagaaaaatcttgcatatccgaaattgaaagctgcttttggttctgcgaatttgaactcttagatcgactatgttcctagaaaagggactcgtcactcactggtgagtaaactttgatcactgttggagggctgaacggtaaatcgcctgagggagaggtgaaaagcagcccacgcagtacgattaccagggcgttcaaatctgttcagaatgttgaggattttggggactcttattgtacggtctctgatgttccgtagacacgatttgcattagaaccatcataaaggtgcccggtatcgacgcacttttgtgcattctaccctctcgcatcattgattatctcagggctatatagccaacgcaaaattcttcatgcaatattgccgctccctgcacgctcatggccaactgtccaataaagttgcaagccgccccgcttatacatgctccttgagaaattgcccagctttagccggcagtatgttccaagaacgtgacaaacatctcctcctactttcgccggctcagcctttgccgcagcttgaccagcatgatggcccaagtctcccaaaggtcaacccgctgaccccacctgccactcctgtccctaattgggactcacgagtccttccaagctggcccgacgcgggtcacggcatatggatgcccaataaacgcgatactacatctctagaacgcgaataccgggtagaccatggggtaatccaggcctaccactgtttcccaggttctcattaccatgcaccaatgccgctaagggaccatggcatgcccagtctctgtctctctcaaaaaacagacggttcacttgagtcgacctccataccttacttgccaacattggtaccctgccacttgagacaaatcgactcatccccaatgtccaatgtagttgaacgtgcgccgggggctggttcctcgacaatgcaaactgtcaaccctgcgttggtatttccagcttcggcaactgcttctgagaccttggatattacatcaagtctccccgcggcccccgaagttgggcccataccctcgggtaccggtatcgtctctacttggattcttgaccagccacaagagaagtcccaggtactccatggcaccactatgtgtgtaaatgaccattcgcttcttgactgtcacgttaatagcaggcagcataatcacaacttgaaccttgagaaccagcaatctgatatgcacgagcggaggttcaaatgcaaaatcgttggctgcagaatgggcttcaagcgtgaggaccacctcgagcgtcacacaaggagtcacttgaaagaaaagccatatgtttgctgggtgcctggatgccaccgtaccttttcacgccgcgacaatctcaaagtccattgtacgaagacacatacgagacgcggtggtcgcaaccgttatgttgctaccctcgacgaggcgagccccgactacgatccagagttccgtggccagctgtcatttgatggacgcccactcaggttcttagctcctattagctctgttcctgaagctaagcctctgcaaccgtgaatttgggcgataataaacatcaaggacatattttgccgacaacaagtaggcgggactaggtggccaaagtaaaccaccgtcatccaagctcagctgcttacgatgcgactagggaagaacctgcggcgcaatgccctgtccccctgtcaacaatcaagtttctcgtccattgtttctgcctaccggagagctttgtcgtcaaacatgccgaatgtatacaactttaggaaacacaacgatagccccaatagtgcaaaggtggcacctaaataataccactgcccctgccattcctggattcgtcaatttgtagattatcttcgggcaaattactggtcaagggagtgcagctcgtttaaaactgtttgacaacatatccgaggctcgtcaataatcacacatagttgcaatctgctccgtactataaatcaaggtactcggttaaaattctgatactacgtttgactaggttgtcttccatgatttttcggccatggctgctatattacatgacacattcctccgctagcgacctctcacgagcatctttcgatatccatcagcatggccaaatcaccccgagaggattgattccagaccttgagcacgctgatcagcctttcttgagtctgctctaaagcttcttccaaggaaaccagacgagatagctgctcatcaggacgaagctggaaaccgtcccgctgtttgttcaatttagtggcagcttccttcggaggtctgtcattttcgtctggtatctcgctctcggagtgtttcggctcacatgaggcccatagacgtcggaagagtcccacgggtcgagccgcttggaaggcgagtttcgggtcatcgcgatcgagatctgccagtgtctccaatatgggttgaaaatgctcgatcgtcagaggtttctttaggatttcttcctgctgctgcgagagaatgtagtgattagccacagtatagaaagtgtcatcgcttagcttacaagtgggggttcggagtcggaaacggcctgcggataggcctcatcactctccctaggcatttcactcggctgacggtctgccctatcttggtccggtagttgttctgaggaatccatcctgttcacttgcaaaatctcagcgcccaaaaacatataattaccagctggcgctggtctctcttatagccttcccagaatcaaacagttagttcaacactgtgacaaaggtggctagctcgtccaacacaaccatgacccgacacatgacagagacctccttgaacatctattttcaacgttcggacttgatataaccgatttctttctttggtcgactttctatttttcattgtaccatctgctcaccattggacgaaacctgagggacaaagaaagaaaaaaaaaaaggaattcctccgcttattgtatggtgactgtagtgatattaagaaattctcgaggccattacctccccatagttttgcaactgttgaatatcaataacctccgaaagcttaccgctagtaaggggtattccggagatacgtaatcctttcccacagctcttcgcactatttcacccactcgtctactcagaaactgcctcttgcatttgggctgtaggctgtttcttggtgctgtggagtgtggtcgttgagtcaacgttagtgcatcaaccgtttacaataacgtcctttcttcaccgaatgtgtcgcttaagccagtggaaatataatccagacatatgtacaggcctcacatttgttagtcaccctcacaaatatgcttttacacttgacgcccactagaagcttgcaaatagcaagacaagcgggaaggtctataactacctcttttacctatgtttttgctcaagacaactgcatgactgatccgcagccagcagatattatatccaaggcgtcagaatgattttgtcccaagttgattaaccgcgggcatcttaatatagtgggaaggtgagaagatgaatattgtagaggttaaaaaaacgcggaacatatagtattaatcactggaatgtccgttatacattgtgctagtcgtgtctttgcaatctcgcatagtggagatagaccagaggaaacggcttgctcctgttgttttagggaagtacattactgaaggaagtaaaacaactgacaaaaagatgcacgctaacccatcttatataggtgacgtggaaagagaacgtccgcgattttgagacgttggtgttgtgatatgaggctggtgcagatcaggaagcaagccgcgccatcggaattagctccgaaatgtctatacagacaaacaagttgattgtaaatcaacttggctccgtgttgtatatataacctcatcttgccctctagaataaaacacgatttatacctctgaaccacaacagttggtccaccgcccgcctactcagatatccccacaacattccatatctcacatcaataatcaaatttcattcgtctctgcttgcggctaccgactaactctagcttgatgtaaatgtttagtgaaggcgggtaagagcagattccagcctgttctggaacgtgttgagcctcaacagctgcatgaagaaagcataccatgtgacttgaacatgtttgactaactagacgccgccttcggtaattttctgccggacccactttttgtggttggcattccctccaaccaccgcatcgtcactccgccaggatcgtctattatccaccaaggtctccccggacagccgggtggtctgctcaggaacagcatatgcagcgggcatggcagtcggtgtccgaccgggctcaaactctctttcaatattggagggttctgttggcgctgcgatcgtgtcggatgtgccattgatgaaagggtcaccgtccggccaccacttgcaggagggttctagatcaaggtcaatcaatcgccaatcaccactcgctctggaatggacgatgcggtgtactgctgcgcgtgtccatttgcttgcgcacactaatacctgttagcctggcaaaaccgaagtgcataaacgggagagcgctcatacccgaaaccgcggtcgttccgcctctaccatccattagacgtgccatctccttgccgatattgatgacatgaaaatggtatttcaggcgcgtgcaattgcggttgcggtaacgagtccggtccactggctgggtatctaggatatgtatagtgaattgcagaatctgctaccgagttagcccgacctattgtaggagcgatagcgagaagaaagatttactcacatcaaaaccccggtcatctcggtgtctatgctcgggacaatcgtttcggtcaaacatacggtcgagctcgaggatttgcgagatttcatcccccacccaatgggggtggtctattccggtaagcacaggacaccgcaaagcatccgagcataatgggggactcactgaaatgtttcagcctaacttgccacaggacttctagccttcgcacagtgtttctccggcttcggctttcttgaacgagatgtcgtatgaacggcaacgcgcggaagagtccaatgtcttcaagtacaaagacgatggtcccgtactggccaaggttaggtggatgcccatacggacccagcacgcataccggaaaatggatcgtcgagtacgtcgcatgatccgcggcttgtgcaatccttccagtcactcctggtcggggtcgggtcactatgcgtaatgtgcgagtggtctgtggtcctggcgcattctgcactgtgtccactgaagctacgtagaatgagggaagctgcaagaaagacctcacccctgagcgtggcatccagagctggacatactgccccggttgagcctcccaccccatgggaactgcaatatcaagccataaaagctggttgaaagaccgcgcgagtgcccgtctagaggtgatgcgccacgacctgtggtaccacatagtatgcagacatgtcccggcactccaggcacatccggcgcaaataccaccaagtaaaacccagcggtaggacgatacccggtcgatcaaatggtagaaaagggcgccggtggcgatcgaagcaagcatatagtggaccttgaggccgagttgcggccaccggcgaaggattgcagccaacgtccaaggcaagatcgagacgagactacatccggcctgttcattgttagccacttctagtcagacatactgcgtaggaatgggaaggctgccgtcctcagacccgcttcacgtaccagaagtgggatggcgagacgagctccgtggcttttatttcgagcatttgctcctaagacggacccatgaagaaggcaatgcagcacgcaaatgcgacctagccaccgatgggcccagtagaacgtgtcgcgttcgacatagtagacgtgggccggaagactgaagctaaacccggagcagaggggaacaaggtgtgtgaccgccaagcatccggctcgcctctgcacatccacccaggtctgagcatgaaggctgattacaatggtatttgcaattaccaaggctgtaagtactcccccttgcaagtatgttggtatatccagccactggagcacgcctggtgttggggcctggaagaaacttctccaggatacctgctgcaacctcaaaggcaaatgacggaatctgcgtccgaggctacaacatatccagcatacaagagcaaggagcccacatagaccgaatgtatcttggatggaagctctggcaagccactcggcaaactttgaaacagggcgtgacatgctttttaggacaggcaatactggacatcagcgggtttatatcttgttttctaaatggctgtttgaacaacgttgacctagagctttgattcaggcaggcgaaaatggcttgggagagcgatgcggcaaaaatgacactggtgagtaacgatcagaaacctcattttatgacttgggatggtgtggcaggttgatggctgaaatttatctttatcggcagcgtaacagtggtaatccgtctcatgtcgattgcaagacgtgcgtctcagaaaaaccacgttcggcgttgagccttaattctacggttcccatgttcctgcattatattacaattgtgagttcacatagttcgaacagttgaagttgatcaacattctgagaagcatctccacatggtgcatggtcgcttatataatagacggcgaccgtctttattagaaatatcgttgaggcaacctcgtgatacgctcttcaaactggtcacagttaggttagaagcgttccaggtcgtacttgccttacgctttctcaggcttccaacgtcaacgatctgtctctcaaccgtactgtttcctatcagggctttctacagagtaggtccgtttgaggtatcgaggaaagatgccaggtggagcgccgaataggtctattctcaagttttggtctatctgtgagagttgtcaagttataatcgagcaaagagtcacatatttatccacaaggtaaccacaagcaacaatgtatgattgaagacgaagaacccaactaggtacacgaataggcgtccttatatatccctgaattcttcctgtgtagatgagtagatagtagagtaatagatttgccttggcagattctactgatcaaccatctaccgttctaccacctgcatggtaacgtggtcggttgtcccaaagtggcagctgatggtactgtgatttccggcacaggtagtcgcatatgtatagaaaagcctctgctggtgggtgtcttagtcttgctcactgggcgtgatcatggtttctctttccctgaacatctggagttgccagactatagaatgttgcacgtgatcttctgagacatcaattggttggatcttggtggcccatcggtgtgggtgtgagtcacatctgattttggtgacgggtatgccaggaacacctcggccagcgacggcgaggaatgcgggaaatagtatacatacaagatagacccgctgttgactatcgtgttttcctggtttctcttctgctcttgggtacaagaattcttcaagtaaaacaaaaccgcgacactgttagacaatgtgaaactgtctcgtgaccctcaacctgtttgcggcaaacatgcgtttgagctgcatttcgaatcagcgtccaaagtagtctcaagtcgtcaaaggtacacacaacctcgcaaatccatattctatgactccttcggggtaaagtattgtactggtatagtgatattttgcgattacgtccggatccctctcgctaaatctagacctttgtgccgggatcactgatcctgtaagcctcaagagaccttgtaaccacgtaactgaatctctttggccccttccattatggactttcctcaggcgtgaactaactccagatgaggggagttggctaaagacctatcatccctggcattcctctggccctcctgtttcgaccacaagaaaagattgttgtcacaagttcgagattctaaaattcaattcccaattttggcaacgacaatgaatggcaagggaaaagaaaacaatcaaatcaaaccataaataccaacagctacgttgtgagccaccaaagccttctaacacgcatgccgactctaggagtgagtgatgggcttatgagaagaggtgacctgaacatgagaaacttcgaggagctcagtaaggatagccgctttctctctactcgacgtttcgagtctgaacgtgagctttgccctaacaagccaagattttccgctcattcgctccagcagatagtaaactgagtggttggtggaactatcagattcgcccgtggttatcttgaagtttgccgggtccactacggaatatatccagataaatccgttggagtgctcgaaagaagcggcactcgcgttccatttcgatatcagcgtgttgaataatggcccgaagattgtgactggaaggccaacacagacatatcccatctcgtcgagtctctctggacgcagagccttgagtatcaattctgcctcctcgatcgactttgaatcaataacaaccgagtctgatacccagaattcggttgaccagctactgaagtaaggtgggaccttctccaatacacaatcctggaagtgaaagaggcttgcccggaggccctttgcttgtttcctttttttcgtattggcaaggataatcttcaggtttcctgactgcgctgtctccagaattccgatctgatagttatgatgttccaggttagtcagctgtgcttgagggaagacttgaacaacactattctcgattgatatgaattcttctcggctgtctgctttgtttggtgggcggccttgcggaagcatggtggaagggagtctgatgttgatactctgaccacagagctttgactgttcccatttctaaacgagctcctcggtctttgaatatatgaaaggggcttttgtgaccgggtttttcgaggagaggcctacacgagagatatgctccctgctgcgttcagcatagttatacatggctattggaactcataatacgcacctattcgcacgccgccaatgcgacagaaacggatgttggagtagctgtaacatcaagtgcagtatcaaacaatctctcttaggaagagcttctggtagcaatccgggagtagcaatccaggggtactgattctcgtcgatgtgaatatgcagaaccagcgctaatttggtcgacttttggcaatgagatcaggttataaaactgtttcgggaggccttatatgggataacacccctcaaggaacaagtacaaagcaatttacccatggccagtcaagatcaatcgtttttctatcacaactttgatatgttcactggaacccaacggagtttccatttttaaaccctggtgaaaataataaaccgcaaacgttcacaaactatttaatatacgttagtatcgtgctggtcaaaagcctttcactcaacgttgagtaaaggctactgaaaataggtctttcatatggcgagagtcaaaatcgccgaggtgaacaggctcgaagatctagatcactttacctgatggacatgcagagaatttcgccattgggaggcttagttcaataagatttccatgacaatgtccgttgaaaccttaccaacttcgttgaaaatttactctgcttattaggagggtctgattatggctgaagcagaaagttacaaagctggcctgcttcagtgagatgcttctacactcagtttgcggttggatctcctaggatttgtaacttccttgcggataaagtggttgtttgactgggcggaagatgtagatgttgggactagcctgcctttgctagtggtagatccagaaacatgtaagcaatgagaagagacctactcagaactaacttccgagagttgatatacaaagcctaccggttatacgtactgtctcccgcgtatggcgatagggccaaatttggttggggaaaacactaaaatcataaggctttcggctaaaaagcgatgacattgcttcacacgcgttaatacagagacagcttactagctggcaaattaatgatgtgcacagcttgagtactatgtacgaatcatgtcttctctgccataccactcactgtggcctttcctgctcccaggaccgctataggaccaaatattgtataacaggactatcattctggtggataactcgtttggcaattgttcttatcggtattttgtggccaacctagggatgtcagctcatccattagaaacagtattcccatgcaacttacagggttagaaaagtcatcattatgtctgtggtggcagtgctgactatagtttgaagacttagaggatcggttcgagtagggtgattgatctctatccgacaccacgaatgcgcggtcttcacttgtttccgaaatatcttctttctctgagtgctcagagattgactcttgttcttcggattcactgggctcactgtacgaggatataatttcggaaagctcattttcttcttctatggccatcttaggtaggaaatgccggtgccagatgaatttacaacagaagatagacaaattttggattttcaattcaggtacgacccccatttatgtagcccgagggtcgattctaatatgccttgaacatgcctaaagagccatgcaaagttctaacgacaagcgaaagaatttagctagtgcttatgggtcaaattactaaaacgttgattcacctgaatacctaattgagccagtgatacgtcgggaatcgttgacgtcatcgactttcaccgcttaagatattcccccttcgtgtagcacaggctttatctatgacctgatgatcctgaagctagtgaggatatcaaaaattcaatagaacaatatatagtgatgctgtgagacatttttcaacgtttgcctactttgagacttaagaaccgctggtggttcagttacgggctatctgcattcttgaagacctttaaactcactatctcaaatccccttcggtggttcctcaatctggtcactgggattcatcgacttcaatactcagggcaaaaggacggacggattagtcaggaaaccacggtatataatttttgacgcgatgactgattcgtgggacgcagcggtcgccctaccataaaaagctggcaccagtctcgcttgctttggctgtgatcccatttattctggcggcgtcccccgctagctttatacccctcggcgcgatgtgttcgattgagactgccttatcatcctcgtcagtcccaatgtcgctgtcttcggtatgttatcaccgggagccagttaactgattctaacttaatttaccacttgaagctttttaatcgcccctcaggtatcgtaacgctggaagaccgacccagaagccccctagcaaaactcatacggtttgtaccgggccgctgagattgggtgctctacgactccgactaggagaaagaatttttatcgtggtggctggagaccgagtatggacaacagctgaccaaaaacggaaaatacaaattcagatggtcggctgagtctcgttccttaaaggtgtggaagcactttgactaggtggtagagcttagctctggccgacctaaggtagtttgtcggtcttgcctcacgccgcttaaccacccacatcatccatgtcataaatcctatggaacaagcacaatgggtaagcacttgaagtccaacttatgtcgcagaagcaaagaggaagtgtccgtttctgctgttaccctaggcccaattcaggagtctcgtgtaagcttctcgcccatgaggagcagatttactaaggcacagttcgaaggacaccttctgcggacaatcacgtccgcaaacctttcttttgaggtcacggaagaacccatattccgagaattgttggatctagtctattccggacctcaagctttggaggttccctcgttaaagaagctccgctattatatgcacgacatagtaactacctaccaagagttacagctgcaggacctgcccggagattccaaggtatcgattgctttgtgctgttggaaaggtccgtttgggcaggactttatggcgattactgcctattattttgataaagagtggagctaccgagaggtgctgcttgggttcgagctaatttgcaggtctgagacagggaatgacccctgtgatcaaatacttggactgatccaggaaaaagggttgctccatcggatattcagcgtgacagtcgactatagggtcgatgagaacctgatgctgttattaagagagaagctcacttcttctggtggtatcagctcttggcagtgctttgttggggttcctggtatagtacagaccatttagctctgccttcggcggtatatcgagaatatcacaagctccccagaaggggaaagggttgagaatgtgcgagaaatatcacacgccaatggttggaccgacctatcagatggcgacgaaatatcatatgttttgggaaaggtgaatgccctctatcctcttgactaaaaaacaaaatctgacccttgcctttcgcagattcgattatttgcaaaatttgtcaacgagacccctaggaagcgcgatgagtttttgtgtctctagcctgcatcgactcgagtcttgccgttagacgatgcgaggtcccgatggaattcggtattcctgatgttaaaacgagccggtagactgcgaagatatatcgactaatactgccaggagagtgggaatttacaatataaattaacaaatacggattggcgtaaggtcgactaccttgtgcaactgataatgccattcatccagtttactacggccctcctggcgtcgagagaggcgacagtctacagggtctgtttcgtgtttaagatactaatggagcatctcgacgagtcaacccgaatattgagaagaaaatcagcaccgtggaagcgcaaactatctgaggcgtcgcttatcatgaagatggaacttggagaagtatacgaaaagacatttcaaaactttggggttatgtatggccctggaactttcgttgctccccaatataaggtgtccgcattcgatgaggccacattatcgcaaggtttgggccaacccgagcgctacatcgagtatctgaggatctttcacctacaataccgaccgcaaatgcccacgagcttgtcttgcgtgaacggactgtcttgttccccgcaattgttggggcttgaccggcttctgtacccactagctggtctggcgggtagctcaaggtgtgcgcaagatgaagttgattaatatctccgcgaaggtctgaacaactgcccaatatttcctgttgactactgacacgtaataggggttctcaatatctcgctatgcgcttactggaaagaccatcaacgcgaatggcctgttctcactcgactggcgcgcgatctactctccattccggctataggagctggcacagaacggcttctcaccgttgcacaaaatatctgccgtacttgtggaggatctctggacgagtcgaccatgcgagatttggtgatgtacgcgtactcggagggatccgaatcagggaagcaatcgatcagccgggtgtaacgtgacatggcgagtgacgatgaatgggaggagttcgaagtagaggcagaaaggcctgaaccgatcagcgatgacgagtgggattcagccgagatgagtgttgacgagcgctctggggacgacgaaaacagctaggcagaggcagtgatactggagatcccacctacaggagacctggagtaggatgtaacggataaaggcgaggggggctcattcctgcctccgcctgtcacgcagctcatcaatagccttcgaagaagattctccggcagatgacagtgatctagcagggtgtgtcatcattcttatccagcatttgtttgctagaatccggcctagccctacctatccgcagtataaattcattgtcgttgatttgcaataaatcgttccaacgaagaatgcatcatattaatagattctgtggaaagcgcgtatataggacagtcaatgttacaattctcacctttggaactgccagtcttgttgcagcggtcataaaaatgtggttgcgacgagcggacgccctgcagcttgtaggtagtcagtgattacttgtaactctttctgtgttcacaactatctttatttgcttttaccatcatgtctgctagatatagagttggcagaattcgatcatcagattgaccctcacaggaaccctagcccaggaggcacttgattctaggtccttggcagtaacgagggctgggccccagccggcacatcaatcaaacttccaaaccaaataattgaggcgcaatatccattttgcccttcgtcgccatcctgccactggttattcgagggatcttgtcgttcctgcttcttctatgtggtttacaggcgtagcagaattccagtcattcaaaaggcagctgagatgaagaaacattggaattgacccgcgatatgtggcgggtgattaatgcagagggctctttccaagataaagtaccaggggatccaacatgatcagtttgattcggttgtgacaggaatcaaggtatggcgagcgtactggtaagatctacaatggtaaaattatctgactaaaaacaaaaatggtctgaatttaacaatctggtcagacataataattaaggaaaacacattgtagaaatgtcgcatgattcagtggcaaagacggtaattccaaaataacatctggtttcttgacacatagatttagtcaaaatttcgccaaaaaaaagaaaaaagaaaagcaaaagcaaaagaatcaagtctataacatctttaacgcggggattgatttccagctccttcactttcgcctcaaagttcttcctcaacctccacatcacccttgttcagcctctcctccttgtagtgatcgtaatttgccaaggctattctgtatctcttttctctctcggcttcgctcatggcgttccacttctccatcttttccacacttgccatgtaatcttgaacattaaattttttaggcgcctggttcttgcttagactgctcccactgctttcgacttcgacaacattcgatccaggagcgtcctaagtggcggaacgggacgggacaacagtacttgtctcctgctcttgctcttgtttgataccattagccatattgtctcctaagatgctagatcggctctttagggtcgatgaaaaagaccctaattgagccggtgtgcgagatctttctggcttgattttctccgcctcgaaggtatctaaagggaatggcaaatgtgaaaccagtttaccctccttttgtatcgccttaatgtacagagtctcctgcaagtcctagattgcgcggattccagtgctggccaccttcctgcccgacaaccgaatcacatccgtccgaggggtctagctgcattcgtcgactaataagtaccggtgcttttccttgatatccttccattcgacattgatccatatctgtggacacttaaggttgctctccgttttatcaatggcgatgcctctaaacccggcaatatttcttttcgtatattgccaatgtcgatccccgtttggcgcgttgtatctgagcagggaaatccgattgtgggacagattttcgaaaccttcggtactatacgcccttgttcttcgaaacacgtgcctgggggcctgggcgggaccaacccgaaaaatgaagaaccgacttttccctgtgccgccaaacccggctatgtcgcctggttggggatcttcgtggcgtcctttcttttcacgacggcattcatttatgttcaacttctcgaagtccacaaatagttgcgggccgacgcttgaatcattcattccacgtgtttgtgctcccgccgtgccatcagaggtcgactcgtcggtgagtttaggttcagcatccgacatttcctcgtccctcaccggggtctcatctgcaggccctgtttcatcgtgtgggtctccagaaatatcagaacgttgacttgagtttggttgatctggctgccccctgtcggcgggtggtcggtcatccacgggccccggtgcagcagcaccatgtttcccatcacttggaccctcttcattggagttttcctctttttttgcttctccaaggagattttccagcgtttcctggcgatgtctgggcgtcttgcgatcattattgggcgttttcttcacgccggcattggagaccataatgtggatcttctatgaggtcttttgtgaaaatttagcaagatgcaaattattcatgtttttacagaaatacatcgagatatttataagccgaaatcacagcggagtccaactatgttcccccgctgaaggaggtattctgcggcttgctccaagtgcctcaatatttttgggcttttttaggacttttttatgacatcacgagcctccttattctttggcgttgacacttgttttcaaaatggtagaattttgagtccagaagttgtgttccaggtttccgtagccaccgaaacctgaggcggcgttgacaacacaagaggcgaaagaaatcaaacctgcctacagtagttgaaggccagaggattgtttaattatcgcttcgccgtagatattgtgtactcttcaaagccggcacaaatatggacctaaacctggggctgaaagtcgaaatttgactgtttgctggtgctgctggatgatcatggatgccccagaatattttgacgttgacgtctctacatctgcaataattgagacatcaccataattcagcctgcggctggagcagtatttccaaattaatgctcatgctcgtgtggctcaatagagaagattggtaaagactgacgatctgctctgtgtaaatatccaccaaccttggttttacaacgacaacaaaagctgtccctggaaacaggcgagccacccaggaatcacatagggacaccgggaaccatacgtagcttgtaaggctactcattttcgctttcggggattcagtcatgtttctgggaacggctctgtgagtttggacgttcagaacttcattcgtatcaattctaagcttactccaagctctaaatcacggctatgctctctcttgctgatccctatgccgagtgcctggtcacgcgtatccacgcgtgattgacagtcccttcgctaatttctcactctcgtcacaccgcggtatactaagatcatagataacacagcacaaaaagttacatctctacgagcgaagcgggttgaaaaacccaaagagcggctggttttgatattcgaggcaattcgacttacgaagaatgctattgttccatcgttccaattccaattttcctggtacatacctgcactttctgacttccttgatcgctattgcagtgattggggattaaaggtgcagctggcttatatgtatatttatttttgcttgccgggtggtctcctcacccttcaggaaatcgttcaacacttctccgcacccgaaggttctttttcatggactgatagaattggagcttagcacgtttttaaatattgatccttggttacaaaactatacatactcgttcatttccaatgtgccagttattctataaaaagatagccaataaggtaataagaacgagtagcctctcactcgtacagctcctcctcatccgcaacagcacgcttgggcacttctcttctggctgtttcggtgagaaagtactctccggacgcggtgtccgattctatttcttcccacgcaatggtatcttcgtacctgctctgtagcaattgcgtggcgagctgcatcgtgacccaatccctggatggatggtgtcggagatcaaggtgcggtcggatagcgtttgtagatattgtattatatcgataatcaatttcctactaattgttgtgagggttgggggtctctttcgatacatgtttcagtcacattcttggggatgactctatctagggactcacatcctggccctaggagctatcttgttcctgggggcattggtgcgattcctgagagcacagatgcagcttctaggggtcggataggccccaggaaacccgacgtggcttctggggtcttgtacttccggctcagggaaccaaagtggtgttcctgttgactgcctcattaactcctggagcgtcaattgcggttcctagggctttatctcaaccttcggtaagagctctggtccgtgtatttcccagcggatacatagctcctacaagcgcttcgacgtttccagtgtcaatgcacctattgtcatagtcaaattcccaaggaagaaaatttgtcgaggcacccgaccacaagttttgatttttctgccaacaatcttggtcttcactcaacattggtccattgagctaaaaccgatgtctatattcttttggcctccttcattaggtatgacgaaaaggagaactcttatatactacactatttagagctatgaacctaaaatcaatcgaaattgcaaagcttttggggtgcactgacatctagtactttgaaagaggggcagtcgcgtggtgttctgatggtataaatatcagtatttcacatttggccgctaagcttgctctaaaacttcatatgaacggctacgctctctgttgctggtccgaatgcggagtgtctggtcacgtgtattcacggtgattgacagtcgcttcgctaatttcccatttcttcacgcgttgtctgtaaattgtaatcccccacgctgagtggaagtcagccgtgccgaccagcgaagcggtgcagaggtagaagggtctggcggtagatgagcccctgataatctggctgacgacggggcccaccagtgggagatggttcgcccccgccgtgtggacggaatgtgagtggctagcaagcgatagcgatatccttctacagctctgcaatgtgcaagcttcagtattgtgggagcgcaagcgagctcttgtaacggtgttgtgtcggccttgggagggagcgatcttcaagccgccgaggagcctgagggttggtaaagtctccatgtggtagagcgtttatgggcagaaagaatgattggattttccgctatatattcgtgtcatctcctaaggattagcgttaatattagataaggtccatactgctggtgaactttcgtcgggttggtgacggggacgaacggtgcacggctgttgattcattcaacccattcgacaacttagcatatggctgtaaattcccctagtttgtcctgattctttgtaataagggagaatagaataacttctcggcctccacctttccatccctcccagcccacgttaaatctttatacacttgggtatttcgtcttataacagaaatgaacgaactgaacaacaatggtctgtacccattgccttgataatatcttgcgctaacattactcgtctacgatttgcttcacgctatctggaatgaatcttttggcataccgacacctcctccttgtctcgctactgaccccaatgatctgtggcaggattttcttggcaaagacgatcctgcagaatacgaaactcaagggtcttcctttatcgaatgccttttctaccctgatctcgacagtctgtccgggttcaagtggacaggtccagatcctctgaccaactctactcgggctagcgacattttcctccacatgtcagcgctccttttccctaaagaggtgcactggatcgaatttcgatttgttcccatttgaccgagtatctgatgagactataggagaggatctgttctccctgccgcgggttgaaacggccatggcgaatctctatcggatacgcagacagctactagacacaatcacctggcatgctgtccgtgcaacaggcactagcttccgactgtccctttggcctcgtacggaatctctaccgtactcgagtctctcgacacattctctgttaactaggcttcccccgacgctatccctggacccacggtttttcgtacataatatatcgagtaattacgtgtgagattgatctgaatcaagcggggttgttcgtatactcatttcagtaaagaccacaataatgaataatgactatttgatgcccttcttgataaaaagcctcggaaatatataacctactttacatacagtgtgattccccttgcaatgcgtcgccgcttgtagtatttctacgtcgccaatataggacggggcagcccggaataggcaattcattactcttctcttataacgtctaacaaccctaccaaattgggactgtaggggtagttccagttatcgagtaggctgatcagtcgttcccgagatgattccaatgcctgtccgaaaaagcgcagtcgagctagctgcttatcgtggcgaagctgaagtccgtccctctcttttctcaggtatgtaccagcctccttcaagttctgattgctctgctctagcttctggccattaatatgcttagacacacacgactcccataggcgtcgatagggtccaataagtcgagctactagaaaggcaaatttgggatcgtcgcattcgaggtctgctagtaccttcaaggtgggttgaaacggctcggtcgccaaggtatgtcttgtttcttcttcgtgttgcgaaggggaagtctacgatggtcagccaaagcatctgaagccaaatggtgtcacttaccaatagagggacgtgatcagaaggttccacatcactgtccttattactaaggtttggtaattcacagggccgctattctcctttttcctggtctagcgagctgttcgaggcatcaatttttcccaggagaaagtcaaggtctgggcgatactagttccatcaggccttggtataatcttatagactatgagacgcagacagacggctatagactgagttttacgatccccacatcagtcaatcaacgcagtcagcttagaatttgcttttattttcagcgggcgcttggtagtaaatttgagaggaggagtatcaacgggttggccgggaaaactgatcaagcctgacgatgttaagggccagatatggacgcccattgacgtgagagatatctcaactagacgcctcttccactttcgttggaagcctgggaaacccggcaaacagcattgcagaataggtagttcggatagtaacgaagggaaaaatagaaaagaaaaaaaaaaaaaaaaaacaatttatcttcgaagtttgatggttatcactcaaattgagcgttgataacgtttggctaagcttcaacgggttgacgggtcatgctaccgtgacctcgctttctgcagtctaggcggacagacccacagctcaccacagaccaacataacactaaaacgaggctagaaacaaaggtacatgattcctagggatagaattgtaggagttttcggtgatccaacgttgagtcgctaatatatgaggtgactaggataagaaatatgtgaatacgtgcctgttattgcggattgaatatctcctacaaagcctcctttaagagggatgtgaaggatttaacagttagctaacgttacttgaccgactcagcgtccctttctctcagtactactcttactcgcctctctcgctaggcatctaaaggtattaagaatgtcgctgcaaatagttgcggtaaaagaagacgtaggtttcaacaggcctcaattaagaaatgtgtccttcaacacttctaaccaggtcggtaagtgacagaagccgaaaagcctataaatacgtcctctacccctacaatcgctctactatttattcacttgattctgtaaagtcgagcaggcttgtgtctgatgtactcgataagttctccctttgatcgagtactagaatttatactgtgctaacatttatagtatatattgtggaccagtaaaccagatagttcctatactgtaagagacgtggttctaagcattcactgccccatttacgctagccgataggagatatgggatttggattagctggtcaaggtatctatgcgaagaggtctctgctatagcgagctgatctactgtcgcggctctggttgaccatagatttgaagtgtaactgctcacactgtaggtatataggcttacaaatctttgaaactgtactgacctgaaagacgcgggacagccagatctatggacgttcgaacacaatgcactagagtaagggccactctttatccctggtcttaactatcagaaaatgtgagttatggaattccacgctggtttactggctaataattgacagtgaacctttaggagcttaccagagtggccctgataaccctgtactaccgtcagtgcaaagccatggcttacacactattcctagccccgtcgcttcgaataatgcagtatgtcctaggtggaagatcgtaaactaagatagcgagttaacaatagggtgcggaaatttaagtgcaagctttagtcgtatcgaagcttgaggcgtccgtccttcctgatagtgagttatcgcgtcttctgctgcgccggtccggttgaatatgctaagccttatgcctaaaatcacgataccactgataccttcacgctattataggagcactctatcattgagggtgaaatatactgtggcgagtggcctaattccgctagatcgaggataagaccaaggtggcggccgacaagcgtgctctatcgcgtcttccgccctcgtccctaccgccttcgcactgttgtggagttcctgaacctctggcatcgcgacacattcatctactatggaagtgcaatgtttatcgcgggtgggttcgtaacgcgtttactgtcttaacaaattgtcttgtgtaccctagcgcggcttttttgaagcgagtgcagattgcgataagcttgaatgcgacgtggcatggctggtgactacattgcagagagttgtaagtgatctagttgtgaagccgatatgaccattgtgcaaactgatcgttacgtctcaagcgtactttgggatttctatgaacaggtacgctacggcaactcgtctaactagattagcccttactgactcggatcgtacaacaggagaacaccctcatttctgtcacttaagtcgaataccacgcgaacaaatgtcttatctactcgagctcccctatataaatactgtcgcatgctctccatcccttctatatgactactatcgacaatgagtcacagaaggttcatatcgcgtacctcggcctctttctccctattgattctgtatatcgggtcattgttcgatttgtctacatgatataactcctaaactccgatcagcctatactactacccaaatcatacctatggctaagtatacaacctttcaaatacctttaagtggcgtaggctgctggtatcgaatgcgtgatcctcgttatcttcggatggcatttggtatctttccagaactagaaaaacgcacaggaatgttgatgttttatcttacttcctggcagataggcgtacctctgtagacaatcaggctgttagcacaagtccacctacaaggggaaggagaggcaaagtctccttattcttagcctataatttgacattggttatctcaggtataaacccagagggtaagatcggggcacacgcaagccaatgagagctcactacctaagaatcacctcgggcatacaggaagctgtatcataagggctgtcaaaagtattgtggtatacccggttggttcttatacacacatttcctatctaaaccgaagcactatctacaaagaccatttacccctaggtatcactgcagctgtaggttagtcaagtcgaccgcgcgtatcctttatccgttcatatcgtctcctaacatatcacgcacttgttaggaaatccggattccctacatccctatttcgatggtttttttgagaataaatcatatattcgtcgagcccgccgcgctgcggaggatacgtaggcatgttactgttcggctaggcggccactgtaaagactttggtgtccgaaacaatatcgaatcagaatgtttataggacctcttagactagcccctagatcctggagcaaactttccgccgtcaatcaacgcttatatagtggttgcttttggaagtatggccggattatctactacgactacgagcgaactagcactcctgcggggatatcacctaacggaaattcgtttcagacggcactgcttgaacccaatcgggtttcaattaggtttcaaccgtgtttcaaccgtgttcccttatcagcagaatatggttgattacattaacttaggacaccgcttcctaaaaggcaattgccgtcacttcgatccgggattggttaaaatatgatccgtcgttgccgaggtatagtaggagccaaccgggtattcttgattgcttacttatccaaatctctcagcaacatggttgtctctgcggtaaaattactttgattcttacgctctctaggatataagagctgaaatagggtaaggtcgagtgactcaattgccgcctcaagtgatggctttgacttcgcaaggcacaaagcctaccgtatggctaattttactcaagccattcgttcggcacctcatcacatgcttctacacgtgggtcttgggcgtattgcttgatcatagttgaaccagtggatctactgtcctatcggactgaggctgtatgcccactttaccgagtgatcagaatgggactagaaatggcttgcgaaatagaatcgacagtgattgatacatttatcatgtgggtgagatggcaagaaaatctccgtattacgtccgtgtgacattgatagacctcgctactgcctataaggcccatagatttgcactgagttactaccccctgcctataggcgggcgggcggttgaccgaagccccgtgtcatataatatgtccataggttgcttactaataagcactttggtcactgaaatttcataattttacaatgtttagccacatatgtatatatcctatagtactacgtattcaggttatttaagtagaaaaggatacaatggatgtgtccagctataaccaaccctagtaaaatcaatggaatatcgagtctaagtgaaattgaaagtatggtccgaaatgtatagaaattgtgatacgtctgcattgtgtataaatatatacatgaccacaaaacatgctgaacctacaaaaccacttacaatataatgcctaccagtcgcacaatataatgcctaccagcgcatcagtaaatttattattaacacgacatactagttatactacatactaggattcgcctttattatgatcaattatctgctatactagtggttattgtcacatgcttctacatgtgggtcttaggcgtattgcttggttatagttgaaccagtagatctactatcactatcggattgaggctgtatgtcaacttcaccgagtgatcagagtgggactagaattttcgcttacgagatagaatctatagtgattgatacatttatccatatgggtgagatggcatgaaaatctccgtactacatcggtgagacattgatagacctcgccatgggccatgaggcccatggattataggcgggcgggcggttgaccgtagccccgtgtcatttaatgggcctatgtgttgcttactaataagcacttcagtcacatgaaattttataattttataatgtttagccacgcacgtatatgtcctatagtagtccgtattcaggttatttgagtagaaaagtatacaatggagatgctcagctataacaaatcctagtaaaagcaatggactattgagtctaagtgaatgaaagtgtgatccgaaatgcatagaaattgtgatgcgtctgcattgcgcgtaaatatatacatgactacaaaacatgctgaacctacaaaaccactcacaatataatgcctaccagcgcatcagtaaatttattataaacacgacatactagttatactacatactaggattcgcctttattatgatcaattatctgctatactagtggttattgggggtaggtgacaagtgatagatttccaaaagttgaaccccctattcaggaaacttacataatctgagggtggcatggaccgatggcaaggcctagacgttgaccacctttttcaccgcccgaccattcaccaccacgctcatcactacgttcatcaccacaaacacacacatcaactcacacatcaacacaaatcaccactcacatcaccacacacatccatacgggaggcaccctgtcggcagtatgggctattggaaataatgccatttgcaaagttcatcattggagccccgataccacctcagaaagcgaaaccatcaaattcgttcaaaaaatggcaccccaggtacagtacgtcccgaaactggtgcaaccgcctacatttcgattgttccacaaatcctagttgccaagacacgctagtctatatcaagagtttttccggagtatccttgtcagcggggtacgtattatttggtgcgaatagtaacacggttcaacgcaacaagcattgcaagacgacactcatctctgtttgcctacatctgaatgaaagatgccaatttctattgtagcgaggaagctattggatcacaagctacttcagagtcaagtctcgacctgctttcaaaaacttgcgttcagtatggtgaaccactttttcgactgttgaaaagacagtgatactgcaaggatatgattctcacatatcattgaatttgcaattaaaccgctcaacgctatggcagactgactactctagccgttttgaccatggccactagccacggtcaccgtctctttcataaggattgaagtgcttcaacagatgccgcaataatgggttggaggctttgtgtacccgtggttggccataagacgtgcctcccattgatccctctacaatcccttttgcctagcctcgcgctaacggtactttctgcgttgctcgcaaccaactgatgttgcctccgctaatacttctgctacctgtcggtacagatactatgaatatactcccaaatccagggtattggttgttttccttgacggagaataaaaagtctagaccttattggaaagcccagaatagaaacccgactccagtttccaggacaatgaagtgagttatttcagctcccatggctcacgagctaggttttcgtgatcgccaccccctcgcaagattgcaacgctactatcacagtcatgagaccctggagaagaatagcacccgacgggccaatcaaacaccacgcgcgaatctagacagacgcaggtagggttccgcgatgcagatctcagcaacgacccacggaacagtagatcaatgaggttctatttgtggagagaaaatggaaacaattgcaaaggtctaggcacgatccacaagctcaaacttttcggccatcagtgtacgatggaacgggggattgttgcctaggtactgctggggcaggtgagtatttggaataacacgcaggctttggcgacagaatggtaggctacaatccgatccgtggttgtgttcacttggtcgtagtcattagaaagtaagtacccctgtcaagtgggaagcagaactttacctctctggtcagtagaacgttctagaagctatatatcttctcctgcaccaagctttccggtgatgattatactatactctcttcgagccagacaagtcctctccatacgctcaattctatcgccagtctagtaactctagtagatggcttatagaaataatgccagtggatcacatgagcttacgtaaatatctccagtttttgaactaaacccggaaaaccgattggttcccgggagtgggttctgtggaccggcccacctacagcacctaacctgtattccaagcaccctgcctatctcgagaatgacactgaatgcagtatcttctaataaaatattgtcctttcctaatatcctatatatgagcagaatgagaatttgttgatcctactccggatctcgtttttttgggctagcaatctataaagtaagtgtagcagaggctgtttagataagctttctatgaggatcattcgtgacagccgcatcctcccgcatcctctcaccgagggagtatttctatggcttatcgaactttattttccggggttcggcgatcgatcgacgatcccggctatgttctacgatctctggggaactaacttttgtcaaactataacctctgtactcccttactattatcgtaattctaaggaatggtgcttgtttatattttaataatatgtatatttatacatataacaatcatacagtagcttgattgctcagctgccatgtttgccattttccccgtttgtagcacatcaaacaacactaattcgttaaggtagttgctattgctacttcaagatcgcgatatagcgcagatactaacaaactgctggtagtatagatattccgctcatcagtatctcagcttcctagctgcacagacacgatgtatatagttccaaatctacgatgacgatcgtgattcttcacactataaagggcggagtaatggtatcgcgcggcctatgatatatgattagcttgtggttaaagggtggtaaacattagtttatacctggtctcgaacctttcctcttcattgattcaatgctgtcgatctagctagtcttagtggttaggattgtttaaatccatttttcaatattactttgcgtaggccttctgcttatgagattcgctaatgaagccttatagccggccgagcgataagctcctgctcggcttcgatggcttagatggcctggatgcttaagcggtctggtactaatacaacgttgcttgcgcagaatatagtacttttttccttgcagagactcagcgcttcagtctatctgatattgttcagaatatgcgtgggagcgggctttccacggcagcgcccgatgagcgtccagctaggcgagaaggttcttttcctcctattcctcccaggctacctcgcttcgaggggacatatcgcatgaactagtagtaaccagaatagaccttttcggacaatagcacgacttgagctcctgatagaagggaaaagtgaacctaaatcctctccacgtcctagtaaaaagataagtacccttggcccactgcaaatcttctaaaggttcaataacattacacatagaccattctgggggtcagttcggtgagtctgaattgtgaattattgattccgtattccaggctccctcaaaccgtcggtgttgaaataatccctagctataagaacacctaactgtcaatttcatactccttgaaattgttcttgaatgtaattactttacattaaaatgaacaaagcactgaattcccagactaagccctaccgggtactgaataatgtaaccctaaacagactttagaggcaaaacttggcttcgtacaaagttcgttcccctaaagtttaatgaattttatgactgattggttgaaatgtattccaaattaagcgataattgtggtaattacggatataagatagtgggccttgcaaaccctgatcgcaacctctggtttagagaacgacctcttcatattagcctgtgcgacttctcttgtaacatctggctgggagaattcattatctcaccttaacacagatctaactatagggagaatccggaaaatcccgttcactgatcaacgataaagctttcggagccaattataacatgcactgtccctatcatcctctgggtccgaggatatctagagtccgccaggatcagcggaaggcgataccacagaggaagagtcttctttacaggagaatggctcctttagtaaccaccaaaacgacattacagtggaggatggccaggaaagtcctctacactcctagagtataggcccgagaccagaagaaggattggaacaacccggataggctaatctcgcggaggactgtaatatgatcgccttacaatgtaccgcagagtgagtacgaatttgccccctataataatgttttgtgatacgtctgcttacaacattcagcctagatatccaaacgaagttagttatacgactcaccagagaacgaacgaaggctgactttcctaggctcatacaaaaagcattggataactctaacagctggattgcaactattcgcagtgacttagaggacatccgcagtcggttggcggtcgtagagacagctatagagatgatggccaaagaggggaagaatagtactacagaggataatgcaactaggcgaatacttcggtcgcagtagtaatctggatcgaaatatgatatggttgtagaatatatcccagagcctattgtcagccttattagctgaggtatcaccatcgcattgtacttcgcgaccaaccatatctcactggggcagactggaagctgtaaataaccgtaaggctacagaaagtagacaaatatttactataattgcgctgtaacgaactgagctccttggaacgaattctctgactccgccagtaacagttgtaaaccgattcgtgctattaaggtttctcgagcgcccgggtatcatttttatcggctaccctctccctggcccactagaccctcacgtccacattcagtggtagatcaatttgagatataaattggctgtcgtacgcttggtagagtattccaaatcttatattatgacccacggttagcccgctcaattgggtttcggccactttaggcggaccagaaaaatactgtagtttgtgccagcgtcgtaggctgtcgcttaaaatcctattatctgccaagtggcaagaaaagtatatgtgaaccaagcgccaaggaaacagccaaatttctttatgaatatcgccgagtcatattgcctatcaaatgctagggggagaccacggatatgattagttagattcggttgcttccgacagatcagcgtatcatctctccgggctgtgggccctaccgctaaccacatttagcgattatggaacattctctctgccctccaagctgcgcttggtagagcgagttaaatcgtcagaggatctacgtcaatatccttctatggcagaacaccgatcgatataatctttgttttctatatttactgttatcatgggacggtagtggcgttactgaagattatcttatgaactatccacctgctagtgcttgtataaactgactagctggttcctctatagtaaagctaggaccgctggacacgctaaatttgctatgctttatacaggtgattagtattggttgcttgaaactggcgcctcctgatttataagggtataattacccagagcggaaaactgaggcagggtattatgacctagagtcccaagcgggccgtcctgctcgggctaacttccgttaatgcctcccgagctaggtaagtaggatgccagtctatggttctggagggtatcgatcgtgttctagaaccgagtagtcgccgatactagctcgccatacgtttgatgtaagaccggctgaatatcgtgccatgagactaggccctgtatggtggcgtgagatgactcctacgcctgctgcagttgacagagctctcttttaagcctctggttctctcctaaggctttgtctcttgctgtgatagcctcctgtagtttcgaggtatcctgggctttttcagtatgcaaacgctgtatcgactgggaatcatgggctctttcttcgtctatctccttaagagccagctggacctccttttggatctggtccatcatatctaggcactttcggtgggtcgcttcatggtctttctttcgggtgcttttcgctgtagaatgcccctaaaagctagcgttagcaaggtgtagttataaacgactgataggataaagtaaaagaatataacgaagctggagtaagtgaaggaaaaatagagattaacataccagccctttgtgattccctaccgccttgagagggttacgttccgccttagacctagaggctgtggaccgagcagaataaggcgaaggggcatatgccctgccagtcccgggtttcgttgtggcagtaccgcggtctgcatctccccgagagggcttttggtcctttgccatgctgaatccttccgtctggtgaatgattgcaggtttagaaagacactgggcaaagcgaagaaatgattgatcgcagtggccttcggggagtctcgactttaaaagtttaggtggagacaatcaaaagccctgaaacaaggtgaacgcgtgacctcccccctgccaagcagctgtgtcggcatcagcatcatgagcctgaaagccaagtacccattgacacacaggggccccacggtgcgctagcgcaaaagcacaagatctgcgattttattgtgaagaaagtgatcgaccgccgcgcaccgggatctacgttgaggtatacggttgtgcctcagtattgaccagagccgaaccatccgagccgctcttggaaacaagaagggctctctggcctcagccatgtgtggtgtagttgtaccattgtcctagatgtaacttccactatatacactgtcccgctattgcaacaatttcggaaagttgggccctaaagacttccatttcattcggagaagaaaccaatccagaaatattagggcatgtattatgaaactagaatttggaatccaagttggaccaaccattgccactgtcgtgctaaattttccttcgtcaaagctcaccagggttccatagctgaccatgagacttctagatcgtgtggaaaaagccatagcaggaacctgggcttagtttccggggcaaccatttgaggcatttcaactaccaaggctcttgagctggggtactcgacgatcgccattttaccccgcgagattgcaacgctactatcacactctggtaagaccctgaacaaaggaagcacttgtaggaccaatcaaaaaccgcttgtgaatatggaccgatgatggtacggtcctgtgataaaaaaaactcggcgatgacccacgggacaatagatcaaggaggttctatttgtaatcaagagaagaaatagcaaattttttcaaaaaggtccagacacgattcacgaacccagtctcgacagaccagtaatgatgcaacatacctttgttgcttggtcctgctgaagggaccagcctcacaggtacggcagttgaggtatttggaatatcacgcaggtgtccagcaaaagaatggtacgctgaaagcaatccatggtcgggttctcctacctcctctcacaagaaaataacttggtcctccgtcgagtggcgacctgttggttctcgttagtctcgtcctttgaaggatgttcaagaaggtatgtaacttcttctgtactagcttccccaaagagtatacccacttcgaatgcgaaatctgcgctttctatgtgctcagattcgatcgccagtcttataaccctagcagacagtttataaacattcaacggatggatcagctgggattatataagcatatttttttgggttttgcctgaaaagccgagaaaccgattggctcacggaaatggcaaggtcccactccttttccagcatccggctcattctacccgtcctcagactctggagatcgagaatattttgaatacagtagtgctatttcataatattccaaaagactacgcccgtagtgagtatacctgattcttctgcattctcctataactattggtacaacctcaaccatgactgatctagaaagcaggtggagcagaactttattggtaaggtttctaatgagatcgataaatcctaagtatccatggataatttcatcctctcccgaggcagtgtttccatggttcctcgaaaatcatttgttaagattcaagataaggcgattagtcatgggccgacgatcccgccctcggttttgcagccatcatgaaactagccctatgacttgagaatggtaggaaagctttccttcacgtcaaaaataactgtggcatagattgaaaatcaattgtatgcctcagtcccaactacaaattactctggtttcgacatagctaacttacccgttagacccattcagaccactgggaatccagctaagcataattctcctaagacgataagagtccagacgtttttagagcttccaaggagccccctagctacgatgttatgatctcattgcgggggcagttttcggttcgagaggcttttataaaccaagctgttaatcgtttatcctctatacttctagccctctttgtacccgttaagccttattagaccatagatacactcatgaccagcctaccactaaatgttggggccattctcatagagaacatctccatcatctagatcgtatctatgttctctaccggcgcatacaatgccctagaaacagcgattatcacgttcgacttattcaagcgctaccggggcctctatttctagagtatgcaatttgcatcctagggaattctcgtatacgccattcctactatagctcgctttatttcttaggcgtccaacctcccgatatccatcccctttataataggatggtacactatggttaccggccaagctgtcgtcctctactcgcgtctgcacctcgttttctccgacatgagaaaggtgcggtgggttctatagatgatcattacaaacgcttgtatcctatatatactaataaccgtttttttcttcggccttaaccgcggcgatatacgctttgctcgttctaccgcgatatttgaccggatctaatcgacggttttttgcatataagacttcgttatctgtagtatatatatatatataaagcggtatatcatttcaagagtgctattataatccgcggtcgcgacagccgcaacgctattatctatctattttatattaacatcctcattataatcctaaacgtcttactattcctcgcggagtataagctacactacattcaagtaagctttaagacggtagtgtacagcgtcaagctgaagttggaattctctgtgctcaactgtctccggttgctgacaagtacgaacccctatatctgctagcatagacctaaggacagccgtcgattaaacgataagaatatttttagtatggcctctttataaccagttatcgcaccagatataagctcgcaatctagagcaacctaaaccgatataccacgttcgttacaactaagcagtatctatggatacaatgaaacgctacgcgagatatcgagcgagaatatgatactccctagagacgtttattcttcggcaacactatcagagggccacttaaatacccttccgggtagctcctcagaaaccctacctacactagaattgagcctatcgcaattcttgccaaagttcgacatctaagtattccacgagggagtactgctcgtttatttcggcttattaacagcagtgcggggatcttatacctttatcccagataggcataattccgtacaaccttgctagttagtaggtggcgacatccttactaaggcacttgattctaagactttttagacagtgtgattaatattgtgcctaagaggatgctattcttcgcttattaagcaaatgtcgtcaatgtcggtcggcgcgataggccactcgtaggaaggggtagaataggaaatacatatacagatcagtgatagagtatataagggatatattatcaaacaagtctcgtactatctatacgcaaattcgttatccaacgatatttactaagatacctttcggtttcaggccactggaggtaaacctaattaagcaaccaggccttgcattgaaatttgtacttggaacaatcatagaagctgagggaaggcttagtgtaaagtaaggcaattattatctaactaggcgagtggaaatcttgaactgtgatagagttttatttacctctaattcctaaagaatttacatttcggacaatgaatttatcgttagtcccttcagtagaagtaaatctttatatcctttaacgtgattaactaagtttgtaatacatttccgtagcatttgtaatagatataaataataaggttaatcgactctgactaatcttcggggtatagcgcagatattataatttataggatacgacggaagccctcggaggttaatcctatatataagtgataggggggaatgactttgtgagggacataagctgtaaggggcttggctaaacaatcaggataaccctataagggtacctaattgagggtaacacttgttgctagtatagaagatagagattcacggcttagactctgggtcgcttagagatatttgaataggtataggatgatagtacttctagaaattaatttagtacctttctaacgacgagatcgataatacagagaacttactaattaatattaggaaagaggctaatattttatatttaagaccagaacgaagatcttcccggatttctttatccgaagaacgaggtagatatcggcatcgtattccgagctatattcggaggcctttttaaaaagggactttcttctcctacgtgctttttgattcgctgcgtcggctggtttggttttaagtttaggttgaatatccatattaagattcttcgctggctctgaccgagagcggacaagaagtaggaggataaaatcaaggaggaattaagcgggcaattctaggattcgagtttgttcgtagtgacttaagacataaatagtggtctatagcgagcgccgcacttttgtgataggggaaatttaacacagggacagaatgttagcagcattagtcttcataggggatattggttggttaagtccatcgttgaattcgtgccagatcgtataaggagtggtaagtcgacccaacttacttaaacggggaactccattttctattcagatgtaaggacattttatcataataataggctcaccacttgttccggtcaatcggtagaatcacattagtctcgtctcgaaagccaaatttctacctgctgcggtatactttaagccaaaagaacagcacaactaggctacactatggtttcgtgatagactcatataaccgcggcagcctcaacagttcaagcgtccttgcattcatatacacttcggagatatataagcggcagcgaaacctagtataaccttcagctatatgataactaaccggtatttgatcacaggaggccatctccccttttactataatactcgtgacatagtgtctacttttgtaggcagttgcattttcgccgacctatgcgcacctgagaatgacctctcccgaaccctacggatctagtagaaagacacttgacaactcgccacttgctgcagatggtagtgactttccttacaagatatccccaggtaactttatcgttccgactgaagaggcgacttatcggactgggagcaataattccatcaagcttctaggcagcgccacccatggcggtgggtcctgccaggtgagcctcaccagtgatcgtgagccgacaaagaattcggaatggaaagttatcaagtcctacgaagggggatgccctgcaaaaggacccggaaatcttgatgggagtgccgagtcggaccattctctccaactccacttcgcgatccctgacggtattgcacccgggaaatacaccttggcctggacatggtttaatcgtatcggcaatcgagagatgtacatgaactgcgcacccatcactgtggctaatgagtcgccgtcaaattcgtcggacaacacacccaaacaatcgctggattttcctcctatgttcatcgccaacgtgaatggttgcattaccagagaaaatgtagacattcacttcccttggcctagaagtattgttgaatataacggcgacagcaaatatcgcccgcaagaaggcgaaccggtatgcaccggaaatcctacattcggcccaattcccattaccgatacagccgacaccggcgaggctagttccactactgaaaatgccaactcgatgccttgttcgtgtggctgccagggtagctaaacttgtataaatatcctgatgagcaatgtggtcctgcaccgcagagatatatagacgggagcgttcagacccatctagctcaatccagatcgtctgtgaagtggaaaattccagtctaataatattcacctctctttgttgattacaaacctggtttcagtattatagttccagcggggagcacatctgcgagataatgatagtattttgcccagcgggtatgattatgtgacgaactgagggagtggtcaaataccactaggacccttcgggactggcttattcatcgttcacccaattccccctagtatttgtacggtattccgggcacattcggaagtacggtgttgcaacacgccgaagcttatttgtatagacccctgagatcattcgaccgatctttaacacctacaatcaatcacctgattctattggacatgttcagtactagccagtacatcaattcctcatcctgacagtatataaaaatcacactctcaagtactcaattggctatgcccatactagtccgtactgtaacgaccacgttccgacacaacctcctggtttcagtgatcttatctgagtcatccgtccagtggcatccacataccataagctagtagataagaaaggacccacctatttggctcacgggattgactgcaaggacaacgcccagatggcgataatgaccagttcgacctatttagtgtcagcattattagtataacggtataacgtgggaatccgcgattacctccaatgcaatcatccacaatctctccaacataccaatgacagcaatcacaagcaaaagaagtgctattgcagagagataacacgagatacaccgcaacttagctcgaccagcagttgactgttaaaataaacaccaataccatacaactacacaaaggtaatccgctaagagaatatagaggctacccagataagcagatttcaaaaggaaggttccaacgtgagagactactattttcgccaaagctaaagccacagagaaagaagggcatataaaacgcagtaatcgaggtatgagtgggttttcgcgctgctggaagattatgcgaatgtacttcagcattattagctcaaaacgaagacactgtatataaccgagatagtattttgcccagcgggtatgattatgtgacgaactgagggagtggtcaaataccactaggacccttcgggactggcttattcatcgttcacccaattccccctagtatttgtacggtattccgggcacattcggaagtacggtgttgtaacacacgccgaagcttatttgtatagtcccctgagatcgttcaaccgatcttaagacctccaatcaatcatctggttctattggacatgttcagtactagccagtacatcaattcctcatcctgacatcatgtctcaaatccaaacagaagcaacgaactccttgtgttacatagaccctagttaaataggcgataaacgaatgcaaacgaatgcaaataaattgacaataccgatgggtcatataagtaagaactgattataacaataggtcgcaaattgagtgtagttaaggggctacactgagcctactatatttgttcgcttgaagagcgtttgcaaactaccaccgtcggaaccatgctccatctaccaatctgctgtacctggctttccttatgcaccaataataatatactgtctaaacagcacagatagaaaataggatcgcgggttccttctcgatttggtaggcctcaaaaaacagccaagcaaaagccaatgagtttgtccttcagcaacgagcatagtaagatttgataccgtgataggcagtcttattagctatactgaccaacaatttcaactctccctcgcatgaatctcaggtaaatatctcattctgtcacattagccgagaacataatgagacagcatgaacttacctgcaagatttcctcgacggagatactttccagttggcaaggtaagttctgaatctccgcttcctactcgtatatacgatttttcaacatcaatttcgtgataacatcggctagagcgtataatttcatcatcgcaggattcatttccgattctttaatttcgcagctattctcgacgcccactattgaaagtcagtttttatcaattttcgcaatatctatagatacctcactaatcttgatatcactagactgcgtaagtaggattgtttccgggcctagggtagcgagtactcgcctaagcccgcgcagatattagattccttctaatacctatcccatattaatttcaaatgcacctacaagagattttaactgacttaccggtttgacaattccaacgagttcgtcggtggtaatcgagtagctagaggctaaaatgtggctgactgatacctctgttagttcccagatcaacgtgtacgatacatcataataataacattcgagcaattttaggaagcttggatagatgacttgttccattagttctaggaaacctatagcgggagagaacggtttttcaagttattagatatacactaacttgcctttttccgacttatttcgggcgaatatcagagaacgatcttaggataaaccaatagtaggctcgaaagtatcctataggttctgattcagttgtgggatgcttacacttgggcgatccgggtatggctctattaaacctagtgtgatcacagcggtagccattttctatattattaggggttggatatatggagacaccgttgagtttggactcagctgctgattacagaaggccgacttatcaagccacacggtagaaggccgggtatatttggtctaagcgcggttcattatattatattgggtttgcagcgtgaaaaaatatagcgaggatagataagggtcaaagaaccatttatagctctaagatattattttaatacatgaccttcgtcttcgcaatgtcagtctattagtaacaatataacgacgttagatctttaagtgtggtagtgaattgccgcaattatagtaggttacggtaaacctctattgatcgggatttctatcactatcaattgaagtatagaaagttaaggtacagttgagcggcatcagaaaatagcttataattttcagtttattttaaaaggtctactttcaacatattcagatactgttccccttaaatatctaatattgtgttttcctttttactagagtctcgctgcagaaaaggacaataggaggtaaaattattcctagacagagatagatatcgtgagctagccctattctgctcctccgtggaggatattaagcaaattaaatggttcgacatttatcaattattttaataactaggaggagcagatagcataaagtaagccatcgagtggtcgatgaccacaccacatttctagaccccttagccggtagggtaggtccgatttatataggggcaggaatatgagctgttatgatagcctctaccgtacccccagttagcagagtgaatattagaattattaaagctaagggcatggcggcgttgttctaggagggcgtttaggttgtctttatgctttgagtggacgccatttcgtctccgacacatacgccgacagtagggtaggtcgtaattatatcacgtgcaaaactctcggtacttaaaattatcaacctataaatatagcaatatcggtaacgttagttaatcaacgtactggttttgtacatgaggcactgtttctagtatcacggtagtcgttaggactttggtagacatatcatttagcctaggctagatttaattcctctatcgaaaacacctgtctcctagctatatcctgctctgtggattagagatagtgcgagggaatggggtttgcgtggtaggggcttcttaccgtatgcactggcaaaaccagctaattcccaagagaagcgcgttttaggtgatctacctaaggatagaactcagatatttaagtagaaaggggggctcacaaaggcggttggcctaatatttacactctctcatatttcacttataccttagcctttaaataaatcatgctggcactaggatcaccaactacccgaaatatcaacgttagttaataaatagctttaacggtatctggatcatacacaataatatgaattgttacttaacacgtttaactacccaaagtttcttaatatagctacttaaactaaatcttattgcactcaattaatagcataatttaagagcttggtctgttagcacaacttctgtcaccgtatggcatatacgtatatagcttcctatagctgtcatattgaacaatttctttgatatttcggggaatcacagcatattgatctggggaatcaatagaccaaaacttgagatattaaatttctcgaaacataccctgtctataagcttgtttgctaacaacatccaacatcaggtggaaagttcgtatatcatattgtgttttggtggcaaaagaaaatatagccggcttctagcttccttgaatttggctgatactattgctttgctaatacagacttctattcatcaagatggccatttctaaaatttgatgatttttactggaagatgagatagactcgcaggaagtaagagtaggatttaacaatcaacatgccagcaaaaaccaaagtaaaggttctttcgaggtacataaacaatagtatatatttactatctacagggttatggttcaatttcttttggaaagatgaagtatatttggcagaatgagaagtgtcaatctaaataaaagcatgctatctatcggtctatcagcaatcagtctaaccattctatcgagcgccatttaggcgatcttcaatctactgaccgccgagggcttccgtacaaaaatctcttttacaattgaatatgctatctttctgggctcggaccaatttccttagataatagggatacatgatgaatattggatggaaatcggaaaactgaacaagaagtgatactgtgagacagggatggacgagaggactattgggcgcgcccaaacgtctacatacagactctttgtgagagttcacaactaaaccctagaagcaaaagggcttccgcaataccggaatgagagttagaataaaaaaggaaaagatggaaaataccagtctcgatgcaacggtaatacttctgaccaggctcttctctgtgctgaaaaccctgatatcacgtatcaagagcggtagatactcgagaacgccggatatccttatcttctttcctaacccgctccagcctatagaacttataaagtgtaagaagtgctaaacaactcagaagagttgctctagtaacagcagttattataatagccatcaccgaccaatccccaccttgagatgtacaaacattgatgacagtggtcagtagcccagcagcagtatataggtataggggtctagtccaggattagagttagatctagctttttatacctctttcacttaggatttgctcacttatacaaatactttgttaatcagccaggggtagtttcccctaagctttaggaaatgcatcagccacataagagccgcaataccactaataaaaagcaagtacgcaatagtgagtaatagggggttctatatcatatatagaactgtgcgaccggcctcattggcttgtaacgtccttttaacctggtttaaggtctacagtaaagtgaatgtgccgggaatgactagatagccggctagtagtgcccagttagccgcactaaccgtgatactgaaccgtatgtctatatctacttcttccctaagcattctagcgtagatagtttcattagcgaggtatatctggttagctctacacaggccgggggtcacatccgtagctaagcaaggcggaataagcataggttcaatttcgcgaagtggcgtcttttctgatcctattttcgctggcgtacttgtatgatcgttctacaacaaaggcaccaaaggagttttagtattaccgtaagaaggtaaatcaacaaagaatcgtatcagctctttaaatagtccatatgaaaggccgctacggtacgtggtctaactaggtctagaggtcctagtatagagggagacgcatttttgccttacggtaagacttacacagtccgggttccgaagccaaaaacgaatggcttctaacgaaagcgcgaaagttgctatataattagtttaagcgagcgttatctgcgaatgcaccggcggaaggaatctggtgcttaacatatttttggttcagaggggattttaaggcgagataagattatgccaacttcaacctaagcgtcgaccaccattaagccactgcctgtccctttcagataagagcccgtatataaggttcccaataggcctattctcttaccaatctctcaatcactcaatctctctaatagctgcctggcttaaccttattaaagagaatgaatcttgggatttagttgataccaactgcctagaacaactagtgtaggaattacctaatccaaaatattaatatccatccctactctacttttacggaaattcaaaccgcaataaagccttgcgggctctattcccctataacaacattacacagaaaggccctataggcttaatccgtctctatcttagcactaagaccgcctatacacagaatcctatattatttactaaaagcagtctatatctcgaacaaagcttaggggattccaagtagctcaagaattcaacaataaggtatcaaaccttcttactagggggtacagatgggacgttaacccctataaggctacagtaagaggttaagaggtaactcgttttaccatagacctagatcctatgtttattcctcgattccgtccctgacatccaatccgcaataaacttattacagagaccacgtcaatagcttacaattggcgataaggttattcccgctcccctgtaggtagtcatcgtcttgactaacagttaatatataacagaagccttcgtataggaatacgcttagctccaaaagctcgatactaggacagtcacgattctagacctacgtccacgtcacgggcttttagatagtatcgttttctagccactgcaaatattaatcgttaagcagcttagtatagtctaggccgagcacatttccaattatcgacgcttctcggcgttttatctgagcgctttctggagcacagaggtacaaacccacgaatggctcctgtatataccactatttaatcttttggaaagagcccgaagggactatataaggaacaaaacgatagacgattgccttcgagaggttatacaaacatgcattggctacctaaaggaggactttaataaccttatagcctcggccttcttaatagacacctatcccccttaaatatatggtataactataattcttaacttatactctcctgaacctaactaagaagctaacctgtctaggattctcgcctactgtggtattcgctaaactttatgagaagcgatacctaagtatttaggataataagttcaaatactatattactagcgtttcatcccgcttcgtacaccactttatataattgagcgtagtaaagatatcggtagccattcgaaaagagacgttatatcgcttatattactagtagggtggtcttcgctccaccactacttatttggtctgtctaagtcgatccccagagtatatactcccgtgtaagcatacaatatataacacttgtgtcgtaatcttcggaaagccaagtcgtcttagggagtaccatttcgaggttactcaatgtcccatctgtaaagagaggtccgacgtcaccgttcgccaactacctccaacgaagccccctgtgattctcactttagatagtggtggagtgcgcggcctgatccaactaggccttctacaggttttagaaagtcgcattggcattccaattgtatctttaccggacctgtgcattggaaccagtgtaggtacgtacgccgagtagccgagtcttttattgtggttgatatactaagaaacctcctctaggcgcattaacggcaattgacgtttttctcaattaatcttcggtcacacaatgtttcaatgcgttcctacacctagcgcaaaacattttttgtcattcgtccaaaaccccaattccttgctatatccggtggtttgcctcggtattcaacttgactacagatagcctttataatcccgaaggtctatcgaagattttgaaagtagccgttaacccatctcgttgtatattcgatatcgccaccgccaatcctatgggttgctggatcgccattgtagtaagccgtatatctgatagtaaagcctacgtgttagccaattaccaaggaggaagtctacgttctaccaataccgcctacgagtttctaactccatataacgaccgataaaacccttccttacttaacgcgtaagtgaccgtttacagccagttgatttagatagtggtagtcgaccttgctaatagttagcgtttaataggtcgatatacagtggtgtagcgcccatataagtccaaacactataagacatttcaatacactgacattttctagctacttctaaccaaaagagttaccaggcctttgcctacaagacggtagggtccgtgcgaataacccactcgccattgctttgcgagagtcgagcattatctggcctatagcgaaacgatacaaccttctcctctctatcagaacaggcttctccacatctccccctagttatctaacgggcatactaggtcgactctgggagggactcttccccaactattccgggccataatatactctctatctatagacggaaagcaagggtttttggaagctctgaattacctaccctatctgtcgacgcctgatattttccaactagaccaggtaatcgataggacgctccctgaattagacgatatatactcgctggaagcgatgtcgaatatggattttgcagttccagctaagctcgtaaggaccattctcgcgtcggcaatgtttttctttaagttggataaaactcctatctagggtaaggcttcaatttattatcgggggtctgttctttattcaagaccaaatcctgccgagatcttatagcgggtgcttatcgagttccccggcgctagatttaagtctggtcaggatcttgatttaggaagtatagatctagtcgacctttgccggttttatagatacttcaggaagcgcgttgattttcgggtcaccagccttaacgaaatagtcacaattgaaattgctaataatacctttcgcaaaaggattagtggtttccccaaatcagcgtaggaattcctcaataagcaaaaggcttacgcccagtttggtcgtatagattatcagaatcaagaatggccgccgcagagatcttattactgctattgtgggtcaaagcgattagtccacttcctagagcctactttagggcagaaaaggcggcgtttatgaactgggtgaagttatggtttagcgctcaagtcagttaataagtagaatacaaaatctagttaggtctcgacgggttaccccgataaaatgcaagacgcacggaggctaggtatactctggtaatatcaataacaattagaatcatatgattatcctagatagaagtctgaattcgaactgcaggatataatctatctataccttgtaacccgtggacacgtgttatagtcgccctcgtttattgaaatctaaaagtgcgagtaggtggcggggcgaagacagaagttcgcccgctatcaaagaaccatacgacgtctctataataccaccccttagtatagcaatatacttggcgcctgggaacattggtaaaattcctagagactaacttggtactataccggtgctagtctacggctaagagtgcgcggtttgtcaacgtggtgagaatgtaaggcaagccgttcagaaactatcttagagtacaaattgactatttcgcccatgaaatggactttccgttcttaaaacgctagtaactcccgtcctctatgtacgtcggtttcagagagccgagacgtggatagtccatgaccgatatcaaccctttccaacatcgaactcccggttactctcgcgacaacacttcaagcatctacagtcgatccacggacacagccaaagatgctatccctattaataccataccaactaccctataaatcaagctatctcttcctaagataaatttactggaccaccaaatctctatggcgagcggatctaccatggccttggaaacaacccggccacgactaagaaaatccaagaccctgaccgaaatgtcggtttccgagatgaaggccgaaagaatgcagcagcactgtcacctagacagaattaaatctgcggcttgagcattttcacggaacttgaaagtataggagcaatttcaggattcattctttatattcctactcgttttacgaacggtgcagttcgccatgcgcttgatgttgtaggtaggatgcgcggacgacccctaagtacttttgaactccgcgtgtaaaaactgtttcactttagagacaaagtcgtcttcaacgctctgaagcactctcctaacagcttccggaagcaaaaccaaccgccgggctaaatgatcggggttagcttcacctaaagaaatttgtaagcaggcattgtgttttagctgggctctcagctggtcgaactctgaaaccgatatcttcacgaacttttgaatgcgataaagtcttttagagctttcgaagctagcgatacatttcgaaaatttgatagcggcgcgaaccatcttaaggaatgttttccgatcgtagggaatgcggtgtacagctgtgtggcgaatgctactaatcacgcgacgccatcctgttaacatgctccaggtcaactgaaaacattcgtccttaacttttccttgatagacttctaagagacaaaagaatttgtgcaactctaaggcctctaggcaagtccatccggctgcgagagactccgatagaagccaacgctgaaggaagcagaaggcatgagtttcgagttattgctgtatggcttacaggatctggtattaagcgcaaaagggaaagtagcgagccaaaaatccaggtagtaagattatactttctatcacccctatccgaagtagttagctaattagtaagcacgccggttatcaaattcggtgacaaacatacacttatgtagcaaatctttcgggaccatagaggtaactaagttgtgaattttagcctttgggggttttataaataataacctaaactaatgaagcgacatatagcctataagctgctgaattcccctagtatatatcattgctaaatgtaagaacctagttgactgaggttggggtaccgtttaagtgggtagaatgaattcaaaaattcctcatgtttctgagtaggcgatagcatcaaattgctgcgggccaacgagtttagattatgacttcaataggggtcggtagctctctccctcatgttatatatatccccaaaaccacaattgtattgcaaggctgcctacaaaagtcaggtatataacatcgaactctttccctcattccccttcacgatgcatatagcgtttctaaaaaatattacagatgatcgcactgggggtcttcattgtgggcgtcctactggttacaattccagtggtatgactctttctctcgccgtccgagtccgacttatgctaacaaggtcactccgtccactttcattccgaacccacctcatccgcttgtcctcagtcatctgtcttgaaaggagttaaagcaacacaaagctctggaagtgtcaaagccatcgaagcgaagactgcctaacaggagagaccttccactgctgcttccactcctgttctgcactggtttcctcggctcgcgatttgtcaagagccactcttaatgaaacgatagctcgaatcaagcgcgggtccccagaagggctgtttgccgggttgaaatgatactgcagagccagactttgggttgcgtccattgtggtgctgacaagttggtggaagctctcaaaacacttgcaataaaaatcgttctcaagtcccttggagtatagaggatggcggtttaaagaaaccgggggggcagaacccgtcatcgacgcgggatgggtcttggaaggacattgttacgatctggtcattcgatctgatcggtagtgaatataggaaggatacttctttgcccaggtgatatcagactttttatagcaaaatacatacattttaatttactaatcatagatctgcatctcgaatttagttaaggctctcataggtaaatggtcaccccacataccttgtgtaaccccaaaaacttttaccgatcaaccacaccgtgtagaggacatacagacatacatgtagcatcgcccagctcgcacctagcaacgttttctccaccattagcgtacgcccgtgtatttgctaataccctcacatcccccgaatctacatacataacaattttatcaaccaaaaactgtcgattaccataggtcacaggtcccggtgcaagttccacggggggtcctatcaattacccgacctaaattatttaatgtaatgtgaattaacaaccctccccccaccacttctcttatatcattgtgcatgcaccttcaatgttaggcgcagggcccaccccaccatcttttattattctccctaattccaaggcattttatgaaattgataaaaacggtgaatacatatatgtattgagctagaataatacttgaaaatatcgaagctctataactgtaccgtaaaggtcaatcaacaacatttaaatgttaggcctgtatggcgaaaatgtccttaagtactccaaaggctcttctgctgtattagtgatttcagtactttttatattgcactcgatcatatcacagattgacggtcgctaagttcgtggctatgtatttacatgtaatcaatttgcctcaccccaccccgtcgatgactctgcttcccccgcacctagtatgagttggcattgaatcgcataaaggactactgtactgtcctacgaattcggctactcgggctccagatgatcatcctatttaaccctgaagacaggtttagaacccaactcagctgaataaagtgattagctgtcaccatctgtgtctactttggatgcatattgttcgcctgcaccgtgcactgatcgtcgtttcagatcgacttgtacggtgtccaaacgctacatagtactagatacgtattaccactcgtgccaataattcttactgatcggcaatgcacatcagcgaactgagactaccttagctaacttcaagtttgcctattcatttgcaccgaaggcttctttagaagagaaaagattttcccatcaccagcaaagggtggcaccatccggcgacaaattgttccccagtaatgaagtcagtcattcagtcacaaggaacactcgtgtttagtcaatatcgatgaagtggttggaatattattcgactgtaccatgtggctggctgaacactcgcgatccactttgcggcatttctcgcgaatggacgttaccatgcacaggaaggtttcgctcctgccggcttgaagttcgcttggatgaatccaagtctcaaaatccacacagcttggctcaagcgtagatcatagctgttaggacgccgataaatacgaaggaatactgcgtatgagtgctgagtaaccaacaatgtctgctatgggagggaaaggaagctattcatgatgctggtcaggcatctttacatgcgggatgtgggtcctgtgacgacccacacatccacggtgttgttaagttggcaggaaactttgccgagcataaataacactagcctcctcggtggcctatcattgaatccacgctcatgattcctgcagctctgaaagttatcttttattttgttgaacctgattctggactgtaatatgatgtaatagttggcaatgccaaaattattgcgcaattcgtgtaacccggcagcggaaagtttcaaggaagtccgaagaaaaccgcgagactctaaacttcaaagggaaaaatttaaaatagcatagaataaaatttttgagggcgctgtatgggtttgtgaattaagctctggttatatctgatttgtaacctatagttgtcgctgaaacacaggctttaaagtctatgtagttatctgtcttacgatctagtaaaggcattggtattatcactggtcggcaaagagtagttttacttcagtgcttgaaagagtctccgtgtctccagcacggaaggtgaacctgggttgttctgggcactgtttcaggcaacacagtacttgcaggcggaggggaagaacgtaaacactatttacggtaatttaccgtgactcatccaggctacatagcatgatgggatcttagcccaataggggaaagtggcgcgctgtgagataagaagagagagtatcgaggtaaatctgatttcgaatatcactgtatagcctcgaaaccgctgtagagagtcgggtttcgggacgtactgtacaaatccagattgcgcggacgttgtggttgatactattgcgatataaaattattgtgttgtgtgccgagcgggagctaacgccagacgaatggcggaccacgggggctcccgagccccttgccaccacaaccacgcggagaggcacggggatcgtcgtaacagaaaaccttgcaccaacgaccacggtccggaccaggagacatgcacgagtggaaagcgagcagacccacgcggccccggagcccgtggaactgaccaataccggaaccagcactggacgagtgacaaccagagagatttggcagattatcgtacacctgcaacacaccgtcgaggagcaaaccacgctcattcacgccacccggaccgaactgagagaagtgaaagataaccagaacgagcatcaaactcagaatgagaagctacaggaagagattgcagcgctacggtcgcaggtaaacgagaggaacgctccaaccccgacacgatcatgggcggccgttgcggccagcacggacaatccgcaaccccgggagacccggcgacaaactgacaaagacgagaactgcgtccgaatcagcacccagcgatccactgaagtgctgggcgcagataataacggagacgcgttcggccgctacctccccaccccgactgcgaacgcccacatcaggacggcactgtcgaagacgctatctacccaggacgcacaggttacggggattgttgctactaagaccggatatgtgatccccgttcaagaaccaggcgtcggccgaaacggcccgcaccaacaccgagtggctgaccgggcttggcaacgacactagactggtgaagccacgtttcagccgttcaccataccccgacctttgggtaggacctcgaagacaggaaaaccgaagccatcggaaagatcgcaaacgagaaccacctccctgaccgcggatttcgaatcgaagacatagcctggctgaagaaaagagacaaagaactggggacattcgcctcaatgggcatctggttcgactcattagaggcagcagagtggatgctggacaatggtctattgatcgatcatccgcacattcgaagagtggaaaagtgtgagatcaaaaagaaacggtgcttccgatgccaaggattcggcgatctagcgtggtcgtgtaaagagacgcctcgatgcggccactgtggcggccaatatgagcgagaaagatgtcctccgggaatcagagagcgctgcctggaatgcaacggggaacgtccgactggagacttgctgtgtccgacgccagccacggcacccccatcgcaatgctagagaacaaccttcgaattctacaactaaacactatgaaatcgggggcgggcatggaagctctcatcaacgaccatcaaagccagaaactagacgtgctccttatccaggaaccgtcgattactgcctaccaaacacacgtgaaccacagcgactatatcaacccacagtggagagcgattcggttcgattccgaagccttatctatgtcaatcgcaaactctcaacctcctatcaccgacaagtgagatgcaaccacccagatatgaacgcccattgggatatatattccaatcggacacctcgtcccctttcgttgaaagtctcagaaatccgataaatggaacattgtagaacttgcagtaataaaaaaataagggtagaaaataaaataaaattgaaataaaaatttaatgtttctatgttcttgatcacacgtccgaaaattgagtgttgacaactatggccaagcttcaacgggttgaccgacggtgatccaacacaaccaacgccactaatactcgtctctcttgctgagctaaagacataaaaattgtcgctggatgtcgctgcaaataattgcggtaaaagaagatgtgggtttcaacaggcctcaattaagaaatgtgtccttcaacacttccaaccaggtcggtgagtgacagaggccgaaaagcctataaatacgtcctctacccctgcaattgctctactttttattcacttgattctgcaaagtcgagcaggcttgttgtgtctgacgcactcgataagctcccccctttgatcgagtactggaatttataccgtactgacatttatagtatacatcgtggaccagcaaaccagacagttcctgtactgtaagagacgtggttccaagcattcactgccacatttacgccagccgatcggagatacgagatttggattagctggtcaaggcgactatgcgaagacgtctctgctatagcgagctgatctactgtcgcggctctggttgaccacaaatttcaagtgcaactgctcacactgtaggtatatgggcccacaaatccttgaaactgcactgacccgaaagacgcgggacagccagatccgtagacgttcgaacacaatgcaccagagcaagggccactcttcatccctggtcttgaccatcagaaaatgtgagttatggaattccacgctggtctactggctaataattgacagtgaacctttgggagctcaccagagtggccctgataaccctgcactaccgtcagtgcaaagccatggcttacacactattcctagccccgtcgcttcgaacagtgcagcatgtcctaggtggaagattgcaaaccaagatagcgagtcaacaacagggtgcggccatccacgtgcgaactccgttgcatagaaccttgcgactccaatttccatgctaaggtgaatgagatctaacgcctacagctgcgctgtctgattatccgcgccaagccttattcctctaaccacgaacaccactaacatattcacactattgtagaggcaccccatcatcgacggtgaaatatactgtggcgagtggcctattccgccagatcgaggataagaccaaggtggcggccgaacagcgtgctccatcgcatcgcgtcttccgccttcgtccccaccgccttcgcactgttgaggagtcctgaacctctggcatcgcgacacgttcatccgccatggaagtgcaatgtttatcgcgggtgggttcgtacagtaaaacgcgtgatcaattgtactgacttcaggccaagacggacttctgcaaaatatatggagtgaaaatggacggagcgcgtctgtatctgcgatcgactgtatagaattcagattcggagagtgaagacccattgttactcgacgcaaggggtcagaaatgtcgggacaggccgagacgcgaacccctgaaccgcccgaccgcgacgaacacgaaaaatcgccgccaccattattgagaccgagacgcaccaccagaccgcgtaacaactatggccaagagcaagaaatcgaaatccagcagagaaatgcgcgctctcagcagaagaagagaacccggggcaagccagtagcccaacgtgaagcggtgacttcggacgacgcgtcgccagcgacttactgccattcatagtccgcgtaaagacccgtgctgtccatcccacgcacatgaacttgggcgttgatgagctagagcttccacagcgtccccgtttatggtctcattgaggattcgtctgcgataaaaagtgtaggcaaggctggaagaaaatataggcctggaggaaaacataggcctggacgaggccctcggcggacaaggtttgcgctttcttgtcacaattgagttttccctgaagaagattccatttctcaaaagaatggcccgctccttgtcattgagacttagtttggaatatccgttaatctcaaccagcggatggtccatgtcagagctgatgtacattctatcaacaccattctcctccgagactagttggtccaaaagctcactgatcggttgaatgggcggctgtgacgatgctcttgtcgaccatccaaagggtggctctcccttctttatcagttgcaaaagacagattgcatcacttcggtgataatctaagacatagcaccatgcgagggctcttccaaatggaataagtagttcctcttgatgtctttgtttaaaaatttcccatccggtctcaaagacgtgtcgtacagtatctctgtgtacgatatctcgccggataatctgactgagctggatcagcactttgtatgttccccagtcggtctttggatgaagatatttggcgaaagttgactcgattatttgcctttgtggtctttgtgcttgcaaaacatttaaaatccggcggcagacaagtattgaagaaaaaaagtcttcgagatcttgcaaatttccgaggatttttaagagcagttcaggaggtagagcaactagtggaggtatggcgttgattttgtggacgtcacttgagtctgcagttttcttggtgttcctctgaggcagttgcgcaagcttggagtgtatataggccaaattttggcacgaacgagcacaggtgttctcaggcattttgatattggtataatggtgtgtaatggattgagtcgccttgagggtggccgtggggtttaaatatcagcatgtgaacattgcaccttgctcagccaagcgcttcgcctcccgatacactgattggtggctccgatcacttagcatcaagtagttttaattgaacctccaaggagagaggagggagaactgtgttatgcgtctgagaagacggaaagaaatggcagaatcctgggtggcctaagtgggattagcgctctcctaggaactatattaatccgagttcgagtttggatatccagattgcaatgagcagcctaatcttatcccctatcctccgtttcaagtgtgctaatagagatgcgagatctcatatttatttatttattttttttttggttattatagtagaacttatgcatggtctaacaatcacatttgttgaggtccgcagctttaaaatggctccctactgtctatttgccttgtttgctggatcaacgttctagaacccctggagttcagctgtgggtctgtccgtctagacagcttggccacacgttgactaaatctttgaacccgagactatcaagatactttttgcttctacatttttctcattttgatggcagtaaactctacaggtttttgttcatcgagtgaggctttcaacaaagtggaaaagggtgattgatatatatacctcctcaccgagtgtcttctgaccctcaacatcttgaggactgatcaaatttgcccgaccgactcgttgatcactatcctatgatcgaattgaccgccaacaacggccgaagaataaccattccccagtcaaaacctgactacattgattgactactgctgtagtaaaactgtatacttagtcagctgcgtctgcatagacttaaaacaccaaagattgatgggagaggtattacccagatttttgacattctcttgcggacaaaatggatgccccgaacagcttgccagaccaggaacatgaaagcaacaatttgttggcattcgggcttagtgaagctggttcatccctcaacaactttgagcctcgaaccataccaaactctcccatccgggagcatagatggtaacaattttaaaacaaatttcgctctgcagacaccattccgagctgagacagttattgaatcatagaaaacaatgttcggaaaatatcttatgcttttttgaaggatgcttttctaaagagtgatgacgtattctgatcactcgccggaagtcctgccacgccacatcaacttaatgcattcaaccaatgtcctccgttcttgctttagattattgatttccattatggatttgcatgaacttctcaacgatgcttcctcgcccacagcgtatattcggcccaataaacaacatccgcggcaatcttcagttcagactaacatgctgccatccttttcgacgttggcgaaaagcgttgactatgcaacaaataatgatagtcagtgcatcttgagtagatatttcccaatacttattcactcacagtatgtattcaggagatcgatccgttcaagcagcatcatgtcgccgtgatgccgcccacgtgcccatctgtcacccttttcaaccacatcatccagaccccagcttcagccagaaaatgagattcccaacagaccaccagagcgccaactcgatatgttgctatccgcactattctatccccaatgcctgtccaggtagttttggaacacacgttcagggatccttcccctcgtcagcgcccagcgtgaatcactactcttccctcatctattttccttctcctcccgctactaattctgcaagcaattatatgtgcacaccgtacacgacctcgttttatgatcccatgtcacattgctgttcgtttcagccagaccctatcgagcacatacacaaagcttggggccaccagcaactggttgaatctccgcttttggcccaaatagtcagccagcccggatatcataaacgtgtcttcccgcgaggtatccgtgcaatgcgcaagaacaacaatcaatatgaatgtagatcttgcgacaggctcttttcgcgcccctcagcactcaacatccacttccgttctcacacgggcgagaagcccttccactgccctaacattggatgcgacagggcattctctgtattgagcaatatgaaacgccatacaagtgactgccggaagaccgctaagctctagcggcgcaaatgcaactccctccatgttctctcagaagattcatttagagaaaccggttccttcatttccaacgttagggcgaacctgtaaaccccgattcgcgcggctattgaaaaatttccggcaagtgatctcactgatttaccaccgcaccgaattttccaagcactatagctcctgtcagggatatacatgaagtatacaggacggatggagttatgaggtatgcaagacccacatggcgtatgcaggttcccctgaacgcgaggaagctacagtaccttttttgcttcctcacgctaggtcttgtatctagagtcgactatatctttctttaattagtcattactcatctgaacaccctgtcttcatctacggacacgtgaacccctaacagtgatatttctaatccccaggaaatttaaatctacccctgggatcttcactttacgttcctgactgaatatgaactggctttgggaacaccttggttagatctgggagctattgcgcttctggggccccacttctggatcctagagtcaatatcttgtctgctggggtcgcggaaagccctcacaagacaccttcaccagacctgcgcaaaaatctgcggcattcaattactcctggaaaggcaatcaatagccccaggaacatgactttggttcctcgaggtggggacacaagaccccagaacctccgttgggcttcctggggcctacgaggctcctagaagcgcttgtatgctcccagaaagcgcactaaagactccgggagcaagagaactcccagggccaagatgtgcattcccggggctgataaaagccatctctaggaacgagactgatttcttgatagtgacaatggacagtcttacaagccacgaacgaattccgtgttgttgattctagcgtcacaccatggcctaaggtctttttattcttacatattggtggcttcgaatggtgctggtattcaatgctcaacgtctagtatcaaatatgcaacacaaatactgcatacctcctaggagccagcagtagaccaagaaattatcccttattgtttcccttttgccctgttgaggtcacttcgtgtctcactttaaacgttgaggaacgtgaatggtccggtcgatagcatatacatatacatgttccaccttgggtatatatatgttgtatccaatcccgacgaaaaagcagacgatcacactcgaattggctgcattctcatcatttgatagcaatgcattgcaaagatccctttctcggggctagatatggtttgtatgtccctttattaaaattgtctagcaatttgacctctagcttagataaactctcggacaatagatcgccccaattttggaagtaaccggggattctagcgcacaaatagaggggttaaataactgtatattgctagtcaatatccctactacgtcgttggacgtattcactaggatattgttaggtaaaaaatccggatagcgaagagtcgggcgacatatacttactataccggactgtcacaactctttatcgcaagcgatccgagtcgagacagatgcaaccctcacgactcaggatgatgcgaccgacccagtgattcctaatcctatgtattcacagaatctacacagttatcccgagtctatggatatcctatggtcgcacagtagtattattcatctccaaatcatggactcgtcggacttccactcgtcggacttccggatcctttcagatattagatctgccctactgcctcgaagcttccatgcgattcgatgtcttgaaatttcattattacatgctttccttgatcatcagattcaaatcctcgatgatgagtggtatgatcaatggacgagcttgtggaatgtcataaaatgtctgaaggggcttttgcatgtccaagcctggctgaagatggaccaagagccagggaatatgatgactgccgaccaggaggcaagattatttgcgccactcatggaacttggttggatacaagatttcaaaatcgagggaacatggccggcaaatgaaggtttcgaaagcttgcttcttggtgggccgtttcagacgacgatagctggtggaggcaaccgtgacctgcttgttgggaagcttatgactatattaaatacatatggtatacacatgacttcacgcccctacccatgacacatatttcaggaaggtagtcccaatagggtacatttgtggcggagtaatcattacgatgggttccgtggctaggacagcttttcttggtatataagttgctaccaggtattcaggagcctaagaccatggatattttggcagagatacgaggctacagtctctttaataacaaaggtgccacttctctgaattatgtcgatttctaccctttattcaataattccaagatgcagagtcttcgtaaagtgatttgcaaacgacgcacgcaaacatgctcacttacgaacttccaacttcgacgcaacatggccttctctggaagcaaagtcctattattggaaaatgagtgggagaatcatgcggcacagaaggaagtccctaataaatcatcccaaactgatgcgagcagaaaggaagcatatcacaagaaaggtgaatctgactccctagaatgcactaatagtaaagtaaattactaagcgctgactaacccgccatcattttagaaccgcccatgcccaaatcgacttccgcaacgtccgaaaccaaaggagctcacagacatgatagtcttaaaatctaccgcgaaggccctaataccgagagtggcgaattggatcctaaatccaaatctgaggaagtcaaacgccacaacaaatttattgctgatcatcatgaaaagctttaaatttgtctgactgatgtcgactttcttagccttccatttccgtcatgattatcactccttactaggtgtctgagctttgaaggtcaatgtgatggatattggtttggttattttggtctattgccttggaagaccctgaagaagggaaatttgttcagaaacgtgccgaatggacgtttaatacagattctaatagcggcgtttcaactgcagtcgcccttaatttgcttaccatcagcccgtatgccctttttagatatatacttcttaccatattaatgaacatacttatctgtttacttgcaatattcaagtcactcttttcgttcattatttcaaaggtcgtgttgtaattcgaggaaatgattgattctcgtatgccaggtagccaataagagccgattcttccctttagtaggacgattgccaaccatatcggcgtgttcaccggaaatgggtctcgcgggctgggatctttgtgtgctatggatgtttgctgcctagcacgaaatgtaggactgaagcttgccagtgtttctataatctagccggtgatcggagacgcaaggctcatgtcgccgaggtctcaaacttccgtgtcgccctttaccggatgactggagctgctccattgtacgcccagcccttctatattaggtaagacaagcgtagataaaggctggtccacgggttacagaaaagatgagtaatttcgcctgacctttcctctttgcttggttttttgcatgatagcttctagcccgatgagcgtccaaagggcgtacgagatacgtcattcataaccaccaatcaggaagatacaatcaagcatcaattttgaggaattatcttgatttgggccaacatatttcagaagttgttgcatctcaattacgaccagcagcagtaatcaaattaccttcgtcgcttttacgactagtgaaatgcgaatctcagtattcctcaggagtttccccgccctttcgaagcaattcctggtatgccttcgtcttacccaggttgattccaccggggctatgctgagcactaagtaaaccggcttcattaattttactcacatcactacaccagtttcctttgttttgactactaacgctttaggtccagcagcaacactgctctggtctttttgtttattggcctggtcatcgccaacatcttgatcaagaccttgtcccttcacctcgtctgagacattttgggtgttcaatgcactgccattaatggttctggcattagtctttacccatagactctcggcactagttgccagatagcccacttacaacttataaccgctcatagggtcaggaatatctttggtgttgaacatgttgggaggctggtaattgaattattcgacaattggcctgtcttacggtaagtgacaatactaatcactttaacaaatatgcgatctctttataggtcatgggtctacataacaaaaccgtgtaataatcatcatacatccgtcatctttaagcttcaggcgtattacgtactccaccacgtggagtatttgacccactctgttgaaccaagttcagaatattttcaccattcgatagcggatatatcaacctttatatttagtaacaccagcaaagttatgaggcatagtatcagatagatgcgcgtcattagcgaaaatgaaataacgccggagaaagtgggaacaactaactcgtcgcattccaatgctagtaaacgatggaaagaggagtctatattcaggccgttccacagtcctggaatgggtaatagcacatcaaaaatggcacaaatgtcgacattgtcacagttatggcaagcattttgctttacgcttgtttaagttcggttatcttaaggataaacatcgtcaataagatcgtgcttagccattgtagtttgacagcctccatatcagcggatcctggttctcttacagttggggagtttctaaagttccggtctctgatattatttcattattattcgatccatttgttacgtaccccgcatctacgaccccaaaaacaacttagtctgtcccgtgtggcgggtgttcggacgagtactcataacacattgttgagagtgctcatacaataattgctttggttttggctttatgcgtatccttttctatctatgctcatcaaatcagtccttacacggccctaagctgcgcgactctgtatgcaacaattggcttatccagtaaatgtccctatgactgcccggcgctttaccggaacaaagcctttagccttcttcttattgctcatgtggcttcgcttttcattagcttttgacagaaattaggggtatggtgaacgtattggtaaatccacgatgataccattctctaactaattaaaaaacaacagtggtccgtttttgacaatctggccggacacaattaataagcaacaatgcatagtctaaaatcacatgattcaatggtactggactcggtaatccatgtggtcagtctgtttctgacagctttcgcttcagggccacagcgtgcgacagtgcgcgtcaccattgaacacatctcgatgccagtcaggatcaccctaatagtccattatgatacaagcgcgtggtgtaatcctctgattaacaaattcgaagattgttcaaatcctggcgggtctgtcggtattgattgtagttgtattacacgcatgaccctatatctaactggggatttggagtgcatggtgggaaattcttggtaggaagtggtaggatttagagatatcggaaggggtattggtaggtagattaactaaaaatcgaggtactgtagttgtgcaaattttgtcggggcgcatcaacaacgagaagcggtgtgtgtgaaccgaaggtaggtcggaaggcacggatcaccttctacaagttcgagctagatttcttttctctcactccaaacgtctccttctcagggcctttgcacttctcgcagaactgggtcaatatgttaagctttcgtaccttgacttctctcacctgtttgacgtatttcgctttcctgggaggtaatgtgcagactcgtggttcccagcttggggacagtatttctaagcgcgaggttctctatgttggtggactatacatgggcatcacagcaaagcaagtcttcattctgaccaattctacatgtatctaagatcttcacacaggacaatgtcgttaattctacatcaatggctctggtagggcaaatttacgtcgagaagctttcccctaagccaaccccggcgaacccaccacttcccattatctttattgggggcgcggctcagaccggcacgaatttccttgataccccagacggacgaccaggatgggcatcctatttcatctccaaaggtcacacagtttacctctcagaccagcctgcacgtggccgctccttctggtatcccgaacagggaagtattgggtaccttggctcccccgattctgtctctgatattttcaccgacgtagcaaacaacggcaaccaatggccacaagcgaagcttcacacgcaatggcctggcaccggtcgcattggcgactcaacattcaacgctttctacgggagccagatacagttccagactgatcgcttcataagcgaagagcaaaatgcgcaggcgtattcagctctagtcgaccttgtaggcgactgttatatcatcagtcactcgcaggcgggtgcatacggtatcttcagcccagcactatgactcgctgaagtgattaacgattgagtaggctggagggtcggagacatgcgcccaggcctagtcaaaagtattgtccagctcgagccgtttggtccaccgttcacgctccgcccgccgtttggaaatcgcccagctttcgctttcggtctcaccgaccttgcaatcggatacgaaccttctgcaggcaagaatgccgaaaatattgagacaaccatcgagccagcaatcgacgccgaccacgacgagtccatcatgcagaagtccccagcgaagcagttgacgaacctgggcaaaatcccacaacttgtggttacaggcgaagcatcgtttcatgcaccatacgattactgcaccgtcaagtacctggggcaagctggcgtagacgttgagtatgcggatctaagcaacgagggtattcatggcaacggacacatgtttttcatggagaagaacaaccttgagatcgcagaccgggtgtaccagtggctgaaaaagcactaatcaacgcataatcagagtcaatttcctcactgcgttgtctcatggtgtttgcacttttaatgtaggtcattgaccgccaggatctttcttccagtgcatgtgaccacactgtggctttcaataattgcctaatccagagatttgtgagcgctattcgtgaacttgactaatcagcgaagtcgagagatcccttataccaagtttgcaagcgatgtcaaagaacttggctcgagagataagtccgcggatttgagcctcagtatttcccatatcaaccccgaagactcgacactgtgctagctccgtcatggttgttgggtccaagccctcgagaattcgtcagctgtatgctggtgatgtatgcgagcggtcatcaatcagctgcctctctttcgatagttcaattcacacccgtttcttcgcattaggcatcaacttttacatcagccaatatgcgcaatttttcccttacagcccgaagcaatttaccgacctgttggcaccgatttggggagaagaaggaaggtatcacacacacgataagtcgttcgttaggaccacgtcatcctgtcacttctaaggaaaacacaacgtataagtatagagcacattttctcgttcgatgctctaaacattgtggcaggataccagctgcatatactgtgcgaccatcctcgcgcaagggaaggctcattgaccccgaccctagttcacaacagaaagcaaactagttagcttgagcctccgagtctacaataagtactgacagtgaattgatagtggtgacatctaacggcgtatcggcaatcatgcgtctcggattttgcaagtgccgttgttgagtcaaccatgaatagatcacattgcgaaaatgtggaaaactggaaaccggagcattcttgtgacatagtatctttctgaggccgccataggccggatagacgtagcggcggcttgccactcgttagagagcgaaatgggtctcgtgcgagcaaaggaaaacacaaccgcggatcgggttctagctagtgttctgtcgccaaagcttgcgggatgttctaaatacctgatatacaccaatagcacctcctaagcaacaaggacccgttccatctccaggatgactgctatcaagtctggcgttgtatctcgtgtctgaacctttgcaggtttttggaacttcttctccgaaccacaaatcaaactccttcatccactgtccctttggccgacactgagattcaaatcgtcggaacacttaacaaatcatttcacacctgtttattgcgagatacaagtcaacaatgtcgtatttcaacatcaagagattaaaactagtgagtagatgtcatctgaatttagattgcaagaaccattccacttccaaattgtacattgcctcaatcccgtaaagaactctctgggtgtgtttcggcagcaacagaaatcggtctttcagacctacgaggcgcagtcttggcaaagaagcttggtgcttgaagttccgtcttgactacgttcgacggcgctctgactttgggagtctattttccaggaactccaatagacggcgaagcttgtccacgcgcgaaagtccaccgatacagataaagaattcaatggcgacgcggttcatccggagtagagattcatgatcctgtgaaagacggtggacagcagcgtggcggataccagaaaccaatctttgccaatttttgtatggtattagcggcttggcggcaagagctgcactgtattttgtcccgatgtttcacgcactaaaggtatattcaatccttgtgcctcccttagttttctcaaccgcgacacccatatttctgagagtctggacaaactcatctagtgagccagcaagcccctgtggagagagaccgtgtctgctgttaggggcgtcgatgaaaagccaaacccagttcttcagtgcagctggtttggagaactcaatggactgcatgtttcagctgccaaatttggcctggagctctttctgcttggcatacataatccggggagctggcaggacacgcccttgcaaatgtataagattgtcgccaaggttgattccgaagaagactagaatagaaagtgattctgtcatctgctagcgtcctccaaaataatgactgtctagaacattatgcccttctttgctactcctaccgcgccactgcgctgctcatagatagctggggctaacgctaaattcttgttggaaggtgttgggcgtattaagttcggaacgctgattgggctacatgttcgaagtaatggctcagcaatgttgctttccaaatattttatttagttacttcaaggcccatcactgtccagatccgcttgtatgttaactgttaaacttagatactaaatactgctgatggcaagaccaggaacagaggatcgtttcatttacacaggataggtaggttctgttggatatcgaaatcaaacacctctatcgtcgctagttattagttaacgttatctaatcactctatcttagtttcgttcctagggtagaccgccttttaattctgcccccacattctacctaatgtggacatcgacaaacatgaacactcatgtctatcaatcacgcctgtctgcctgcacgcgacacaatacataatatttggtctacctaccatgcgcggcgaagtacgtgctatttctttgccgctcagtgatggccgcgtttattgttcccctcaccctgtctatttcccaaccctgagacgcaaaatacaatgggtctcgctgtgtggcaatcaatacagttgcattagatcaagccaaacccctcatatgattgaagctgatgtactaattgaatagatatgtcatcttcaccttggccaggctggtacccagttgggtaacgccgcctgggagctgtaagtcttactgcttttgtgacccatctggcgatgtttaaccgctcgatgaggatatagatatctgctcgagcatagcttgatccccgatggaagtatagatcccgatgttagccaggaaatttgccagaggggctcttatgagacctttttcaccgagaccggaaatggcaaatacgtccctcgttcgatctttgtcgaccttgacccttcggtatgtaaagaataccaaaggcttgaattaaattggggataactaacatattggcggtgatatagactatcgacgagatacgcactggaacctaccgccatctgttccacccagagcaattgatcagcggaaaagaggatgcggccaacaactgcatgacaccctaatatcggaaatccctgtggtcaggactaatatgtgatagacgctcgtggccactatgctgtcggcaaggcgctgttggaggatgttattgaccgaattcgccttgtggccggtgtgcagatctaatacccccttgattcctgacctcttcagctcatcttataacagataattgctcttcccttcagggattcttgatcttccgctccatcggcggtgggactggctctggcttcggtgctttgttactggagcgtctttctgctgagtatggtaagaagtccaagctagagttcgcagtctatccgtctcctagcgtggcgactgccgtggtagagccctacaatgctgtgctgtccacacacggtaccatcgataactctgaatgtactttccttgtcgacaacgaagctgtttacgatatctgtaagcgcaacctagacatccctcgccctggatatgatcacctcaaccgtctcatcgcccaggtcgttagctctgtcacctccagtttgcgttttagtggtgccctcaacgtcgacttgaacgagtttcagacaaacctcgtgccgtttccacgtattcactatcctcttatttcatatgctcctgtcatatctagtaactgcagtggccacgaaagcttcaaagtcaaggacctcaccttccagtgtatgtactctcgtgtctttctttttgaaaccgtcaatttatacttaccgtttgacaggctttgagcccaaaaaccaaatggttgtctgcgatcctcacaatggcaagtatatggctgtcgcccttctctaccgaggtgatgttgtgccccacgactgcaatcaagctgttgcttctgtcaaagccaaggcatctttcaacctagtcgagtggtgtccaaccgggtttaagcttggtattaactaccagaagcctataagtgtgccccatagcgagcttgcatctgttgaccgctcagtcaccatgctctccaactccacctcgattgccgaggcttggagtcgcctcaatcacaagtttgaccttatgtattccaaacgtgccttcgtccactggtatatgggtgagggcatggaggagggagagttctccgaggctcgtgagaatctagcggctctagagaaggattacgaggaggtcgctaatgacactatcctctctgatcgggaagtggatctagagtactgatagtgcctatcttcctattgagcggtattattaggacctgccgtgaaatagttatttgttcgtctagtaggtcgaattcagaatggaattccttatcagtctccggattcccaaatctaactagacaatttgctaggactgcaaatttaaaaaccaatgccgactttgccgatgtgctggccgctggcaagttattttaatgagtcaaagacctcatcaagactgaattgccaccaccgtagaacggttgtgtgtagcaaatgaacttagtcgcatcctccatttgctcctttgagccgcgtgataccacgcacgacagctcccttggccaaagcaagatcagcaacaccaggacctcctcttgctttgcagcaaaagtgaattcgatgattaaaaccaaaccacaccacggaaagcaatagcatcaagggactgtttgatagttcccgagccaccctccaggataaagttgacgccctgtccatcgatgatcttttgagcctcagttgcccaggcggggttgtcttgtagttgataatgtagtaagcatcgtactgggctttaaggtactgaaccttctcgtcggaagaagatgttataatagtcctagcacccgcagcctcaatattttgggtggtcaagtgataaagacctgtcatccaaggaaaactttctttgcacaagctttacgacctgtttcaagaatcctgtcccatctatctcaaaacaccgcctatccagagtgccataaaatcgtcaatgtccatttgatttgccggtatggaagccagccgttgctattcaaagccccgagacgcactacaatataagcccgtccacactaatggctctgtcgacccaaaagtccatttctgcggcagcggaattctgctttgctttattttccatataattcggtgctcttcatcaataagcaatgcgatcatagcattggtttttcctttatccaatctcttttgttttggtacttctgctttttgccattatttgcttgattcgatgaaacagctctttttttctttcttctttctgttcgaccatatcggaattattctgcacatatgggggacgtccatatcggtcttgctcttagagaatactggtagtgggaaagtacataataataatattattattattttagccttcagtcattctgagaatcacgctggctgaggtggtctgtgccacttacttgatcacctggcctagggaaaggagagaacgagtgctcattgttagggtgtttggttcgttggctttatgcagcgtctcactctacaatgcccacagaagtgctatactatgtcgggggaatgcctgatacacctatgctccatgattgcatccatattttacgcttcgattttggtttatccgctgtcgctgtcgctggggataaaccccgaattcgtcgaagctccatccggcttccaggcctttggatgctgcccgcgcaatatgttccttgtacttgagtttcgtgtccatgaggattcccaagatattgacatggtccttgggctcaacggtttgtctcttgatagtgaaacacccctgctccggtttgtaagccttgggagcaaggtgtatgatggctgttttgtctgcttcaaaagtcgctccgctccttttctcccagtcgagagcttcattgagagttgcttcaacgccttctcggttgctctgggtgtcggccacgccaggctgcgtatatctgctcttgcaagagcacaagcgcctgctccgcagaccgttgctttcaggctccgaaatggctggtcgggagcaagccgtgtgtctccacaacgtgcgagatcctttctgctaccacggatccaagtatcttgcccagcgtcgcgaggagcgaaattggcctccatgcaaaggtgtagtttctcttgttcggctttttgagcggtatgatcttcgcgtgtctccactgtgtcagcaacatgccttcttccagtgacgcctgaaacaagtcgagaatcctgtgcttgaccgtgggccaggccctatacaaaagtgcgaatttcttctaatctatattctacattctatatggaaggatctatactgactgattcatgcctgatatatctggtataatccgtgtattcatgcatgggtttcaacctatcaaaaggaacgccgaatataaacttcttgcttcctgctacctctgttccttgtcgaaatggttgtcattaacttgtgtaccgaaagaaatgaacatgacgatgggtaagagtctggaaccaagcgaagtaccactcatctggcttccaataggggttgaaacaggtcgtatactaatgggtctcgctctttgcgatggtcccagccactggcgactatcgtcataggcaagccactaggcagcgagatcgcgaccctaatagagaatacccttctggataagtcaagggcttcgttggcggcgaatatcgtacttgcatataatacaagctggacatcggcttttccggagatgttttgaatgacgcgttcgtgttagccatattccatgatcatacgaagggtacccacccgcatgcaacgaccagcttcagggcaccaatacgtgagcccctgcgtatattatgactaacacaaaggtcctgcagcaaagtaggaagtgagccattgcgaggaataagcgtttctccacaaagtgccacacgagtgatatttaccgtacgcctagtgccacattagagcctttcaacttaaatagagtgacaattacagtggcttcccttgcggagaataagcttgccatgagattgagaagtcgtagctcacgtctgcccagtgctcagatgaaagaggctttacgttgataatcttttttattgaggaagccggcgatactgccggtcggccagactgaaagcctccaagcaatgacgaaccctcctaagaatgacacattgagtggatgacttgttcatagtctaggaaggttagccatggtgattaatttctcgctgaaggtgtcttgtttgtccaacaagccttctttagtggttgaatatcaagcgaggccttaccatgacagcggttttttgacacatctcgcaatgggaacgactcgttattggggatagaagagaagtttaagtcaaggttatggccttgggtcgctgactcggaatttggccactgtgctggcacagattgtgcattcaagcttctggtagctaaagagatctggccataggagtgctctgatggtggatgttctgggggggtttgagctaaggctcctggggatgcgagcttcgttggtgcttagcattagtgcttttgcgacataaaccactgatccaaaaccagtaagatgtttccttgcggttcagacctttggtcgacctaccttatttcgcacataggctcctcgcatatgaaagatcgatcactagtgtggattctccgatgacgggcccgacttgatgactgcatggagcccttagtatttgggcaaaacttattcaggatcattccctcacgtctgcaaatgctttctgacagcccgtgtagccacagacgtgcggcttttcacctgtatgagtgcgtatatgtacggtcaaagcactacgttgtatgaacttcttattgcaattttttttcggtacaatgataggggcgttcgttagagtgtattctagtatggcgcgagagatcgcacctgcgatcgaaactctgttagagttggcaggttaatttgggaaaatctgagtggacgttgcccttcgaatagctcgatcgaaagaactgaccttgtcgcagtgaccccaagaacacttgaatttgcgcttgctggcaggagccgtaggaggaatcgttgactgatacgccatagtcctttttttggaagcggatatgacggccatcgatcagagtgaatagtaaagggatagccggcattcaagctcggagcataacatggaaagcaggaaaaaaccagctgagaaaatgggagagataggagaagaagggagattggatctactgctatcattaaatgctagccttgaatggaagtaggcaagatgaatgaactttccaccgacgctttcaatgtccggtctattcccaggccgggaggacaatggtggataccaatagactcggtgcggcgtttgtcagtctataaatccctctccagcacgatatcccaaccaacatcctatgaccaaactgaccaaaaatggactatcccacgttgccttccctaattagccggccacccaggagacagcgtcgggtatcgcaggatgcagaagatcagtccaaattaggaacccatctacagcaatcttcaaacggcacaaacatcgaagccaaggtcggtcatatcctcttcgcaggaaacgaacaaaaacactaatactgcgcagagtccagtgacaccccgtgcccttacggtggagtttatgaaacttttacactacaatgacacactcgttataccagccctcaagctgcttgacttgtactcttccctatgggaatgctacgtaatcaaatctgccgagaaaatgcaatttgaggataagcagcgacagcttcttgaatcaaatgagtggctagcaagcgacagcgacatccttctgcagctctgcgatgaacaggcaatggagttgcgtgatcgaaagcttgcgcttcaggccctttgtaacggtgggttcagccttgcaagcgagcgatccccaagcctaccatgttgatgagccttgatgaggtctcagagttgttgagcgcccatgggcgacaataacatttggatagctctgacatctatttgcgttctctccgaagtatgatcgctgattttagaggaggcccatgcaaccgccggtgagtttccgttgggtttggtgacggggtgtcaacgtttcacgattgttgatacatccgacgcttgagtttcgagaagttagcatcaggccaccaagtccccctaatctgccctgaccttccgttatcgaagatagataaagtcctgctcaggttgcggcattctgtccctctcagccccgttaaatcgctgctttacacacttccatattttccctacagcgttcgacggccagtcatataccagaaatgaacggattggacgagaatggtctgtacccgtttctttgatgggagtttgcgctaatgttaatagaccacgatttggatctcgaccttcacgctatctggtatgaatcttctggcataccgacaccgcctccctgtctagttatgccggtacgagaaatgtatatattggaagcatgttcgtgggaggtaaggttggtgacgacatcgcaaaatacttgggacttagagatgctgttggcaaactggtaaaggaaatcggcgaccccggttacccatttccggatccactacaccactggtgttgtgtataattgtcatcgactacgtgtatgagctagtaggaaagccaacctttggcttgcccccgtttgttaccatcaactacgagcagaaacacggcatttcaggaagttggaccatgcaccgaattggagtaacatctaaaagtgatgaccagatccacgaggctggtgagaccttttgtctattattttaacctctaatccaatattgttttctagcgcaaaaatgatttaacattaagtctaatgtatctctatagcgcaagaaaccatatcgaagatgccgcaagcgtaccacgtacttgacaataattgccagcactttgtggtaaacctcgccgatgcgatcttgcgagatcctcgccacaaatacttgtccgttaaaggccaattcatttctgcacatgaaattggagttcagcctgagaggagcgagccaacacaagatgaacaaaacttcaagggcaagcaagactttcaggaagacggagacatcgaggaaggaaaccccgtcccaatcaccgatcgagatgccgagggtgctgttattgagaacgagaaggaacgcagaaagatgatgttgaagtccatagctgacttcatggctgataacactccacttattcaggaacgcgaggtaatttatcagtagcgtgccggggttagacactagatctttttgggctttgctcaatactaatataatgtagtaatacattcgttctacttatgaaaaagacttgtatatcactacctaggtaatagagtaactatatatgaatggtattgggagcttgtattgagaaccttgaaagaacaaaagcggatttttagtgttgctgatcgcggcgagtccatacatgtcatgtctggccctgtcgcaatgtcggaagagacgtgatgcggcggaatgacttgacagatcgtccgccactgctatttggagaagttttctcacgagctcggaaagatagattcaaaatcacctgtcattgtgacgttagcgataaagatacattgcggaatatccaccaggtcattcatcatattggtgaaactggtgcggatagagtagaccatagccttgatgcagtatatgagctatgattttagattagtaatcggcggcccatataaattgttagcaaagtcgatacagcaatacagagagttgaacaccattgattggaccctacattttacaatacggcccacgccgacagatattcctgtatcagtattaatacagtgacatactcttaagttaatacgttgctctgtcttgtaattgaattggcgacccaagaaactagaacttcccataggactgcaaacaactcaagccccagatctgggagggcctcgggaatttggtactgtacctctgatacagatgggcgctgcagaagtggagaccggtcttagggggttgaattaaagcttatgtttacatggatatttgcatgtactattcctattcgggccgccaccttggcatggctgcattacagccagtagataggcaagatacaagtcaatgaatactagtactggtaccgatggaaaataaaggggaagatgccacggtagcttgaaagatgctctgaggcttgagttcataacctgtcgacaaaacgataaaacgactgaattgaatgatgctcaagatgatcaagaggatcgtctcttcaccccttcggtaaggagggataggacaattctcaccattgcaatcggtaggcgagatcacgtggcgcgagtcgatgacatcccaagcatttgtgtgaccctcaggtgcggtaaattccccactccatcggttggctcttgacgttgccattgcagttcatattccccttggctccaatctttccatcccgggcaaaccgggcaatggaatcattaatgatatcaatcacatcctgtcctccaactgtaaactgcacattcccatcggtcttcgtggcctcaatgccaaacgcacaagtgccgtcggacaggatctcacggtgtgggtgcccgactacctcgtgatcgaagtcggtcgaaccgtcgccctcaatattccggatgatcgtctggcagtcagtcaccaagggcgaagcacccgtcgtttggtcgatgaatgacgagtcctcgcaggtactcttccccggggggatatcgcacgggtagttgtcgctacttcccttgtccgtcgtgtcccacgattggtacgcgcggtcagcgctacacacgggaattcgcatgaacccaggcgtcgtcacgtcaacatcgatcatgttcgatgcggtcattcggtcttccgggtccgccactggcgcgctgtttttcttgccgttgtcgacccaggtgcgtacggaacctttcacgagctgttccttcgtgaggccgccgaattgaccgtccttgagagtctccagccccgggggaactgagaacttgttgtcttgacagacagtttggcagggaccatggtcgccgacgatcttgcattcgcacttctcggcactgtccttgggatacacaatgtagtactgattgtcatcgacgcagacgcccgtggccgccgcgatatcgtcctcgaggtagtcgccatgctggttgccctcgccgcatgcgtggcctgcgttgatgatgaaagtgtaggcatcggattcgcgccagagggccgggattgaccaaccgaagatgcactgttcaatgttggtggtgagagtgctcgtctcgttgtatttctgttcgtccggctcgccttcctcgtatttgccctcgatgagctttccattgcgcatagtctcccacatgacgtcgagcgactcgggcgacccgtcgaagagcttctttaccgacatggttgccgttgcatcccaccccctgatcacctgcgccatgtaggcagagaaatgatcttgatcctctgctgtccaatatgcgtcgtcctccgggagcacatccttggcaattgtcgtcccctgccccaccagcgtcatgacagtatccttggtatcctccaggctaattcctttctcccagaaggccgcctgcttcttcagcatcgtgttgaagaacggcccggcagtaacgagcgtccccagcgtcagcaaatcaatcagcaggaacttccacgaatcatcctctggcggcggaaccggggcaaaggaattctccatatcatccaactggaagctgaccagtgtcgcggcattgtaaagctcatcccggaacttcttgaacatctgctgcatcttcaccagcgagttccagatgagctcggccgcggggccggactcgggcgcgttaaatccattctcgcagccgacgatcgggcactctccgaggatatcctcacactcaatctcgctccccgtgcggagcgtcgtcgataccgagtcaatgaagctgaccttgtttcgcttggagtcagtgtagatccagatcgcctcgacatcctcccatgccgcaagcgcgttcagcgtcttccaccgttcagacggggtgtagtcccacttgtctttactaacgacgtgcgtgcaatccatgtccgtccagttcccatgccgcgtatagttcgtcttcgggtcgttgccgttcaccaccatgcgcttgtacggcttccagtcatccaaggggcccggaggatcattgaatttctgcaaatcactggcccagtccgtggttcctcccaggccccaggcaatgtagagcttggtacgggtctccttggtcgcagcgctcatgtacccaacccactcgatatcatcatagaccaggacgtcgctgttgctgctcgcgtccacgtattgtcgattcacgcgactcgggtcgctcaggatttcttcaatctcggcttcggccaggtacccgcctgtcgcggtgcaccgccccttcttcgcatacgatgtcagccggtctcctgtgaactggcactcggggccccagcagtccgctgaggccatctggaacgcacgtccgtagctcgtcacgccaaccacgaccttatccccgggaacgccagctttggtgatcatggccagcgattggcgcgtctcggtgaggttgacctggctgcgcagacagttacccaactcacagccctcctgcgcgttggggttatgtgcgtcccactgcccgtggagatcatacgtcatgtagacgatataatcgaccacacgggagatctcgcgaatggggaactgtttcagataccagaacgaggcgggcgccgcaatcgccaccgatctgcccggcagcaggttcttgagaatcaccaggaacgccagatagttcggcccgtcctcctcgcttcccgggtcgaagctaggcagatccggcgcgccagggtattcccagtcaatgtcgacgccatcgaggtcgttgtctttaatgaagttggcgatctttgtggccatgttcagccggttcgcgggtttcaccccgttacggaagatctggtacgtctccgggaaggtggaaaaatcccagccgccaaaggacaggatgcgtttcactttggggaggcgtcggaattcgttaaactggtaagcggaaagctcatcgcccacggtaacatcatagttctcgtccagcaccccgaagccaaaatgtaggtgggtgtacttgtccgtgtcgatctgcgaggcatcctgatacagacattcacgcttgaagcagtacccctggtagtaggccagcttgatcgcgccagtaccgtctccctttacaatatccatgccacagttagagatacagccgtacgtgtccggctccgcggtgccgggggcaccggtgttggtatccacacagaaatccggggtaatgccgcactgaccccagatattgcagcaggcgttcagtgggcacgggttcatatcagcaagatctgttccgtcagtgggcggctcagatccaggcttctgcgggccacagacggcgttggcaatcgggtcagggaacggtggtgaacccttgctcaggcacatgatggtgtccttaaacagggggtcacaccccgaccagccccaggtgttctggttgtattcatccagctcgtccatggtcagggcgtactcggcgctgatggtgctgcagtcttcgtctttctggaccttatgcgccttgcacgaaccatcttcgttgggtatgggacggaaatcggggaggtcgccggaagaacagcagacgtgctgcttgacccttagcgacgtgcagaagtctgagccagggttatacttctgcaagtcagagacggatatgccgcacttggcagcgaggtccccgcatagattacctgcctcgacctggacagtgctgcactcgtctgctctgtggatcagatacctggccgcgaggctgggggagccgacgctgtggtttgcgctgctcgagctgagaagcggcgtgctgaactgcgccgtgccagcaaacgtggtggagccggcatacgagagacacgtcgcgttggtccaagaccgcatggccgtctggatcgctgagaaggtgccattactggtcaccatgactccgaaaatgtgcgaggcgtcatactctggctgacagagctgcatcgccaaagttggcgatgacacgttgaaattggcaagattatcttcaaacaccttcagtgccgactcggtcagcccctggttcagcaaaccctgtccaatgtatatgcccagggtagccgaaccggactggccgtatatgataaatggattgtcgtcggcagccccgtgtccgcgatcaacatacttgcggatctgcttgacaatcgacttaatcccggaggtcgcaagcccatagccctcctcccaccaaccaacctcgaattccacgttgaccgactccgtctccgccgccgctatccgcatcgtctcacgggggatcatcgagaaatccggcccgaaggacgagcacgcctggatgcggtgggagacgcccgcctcgtcgaccgggtcgtggagagagaagtcatagaacatggtctggtcgcatcgtttgatctgtcggaaatcgccatacaccgaccagttcccagtattgggaccggcaacgctgcatcgctcgggacagagggagctgctgccacggtagccgggactggcgccggttttggcaccatgcaaagcatcaccggtggttgccagcgccagcaaactggcgacgcccagggccgcttcgaatagtgaccgagccaccaccattccgacaaggctggggtaaaaaaaaacgaaagaaaaagagaggaaaaagagaaaaagaagagaaacaaagagaaacaaagagagatcagtattgaacgaaagattaaaagaatgaacggttgaagaactaaaaacaaacaatgagtgacggagggtaaagggaatttttatcatctacgcccatacatactgaatgggcaacgcttttatacagcaatcattgtacatcccgactcggcccatctcgatcgctcgaatgctcgtcccggacacctcgtgtaagcctggactgtggccccggtaatccttctctttttacctttgctccgcctgattgttacatcgcctcattctcggacgacccaagcgagatgaaatccatatgaagactccttggcagacatgccgaagcacccggatgagccatgcctcggagcgcgcgaagaaactcccatcccacctgacgaaaagcaacatgggggccatccttggcgcaatattagccaagattccagcgacgtccagacagggcatgcgttgcatgttaagagatagaccgggacgactaggatattgactcgccaccaggttttgggggcgggtgaccaacaagccaccggcggatggatgttggtatctcatttaacctgcatgcgccaagacattgatatttgatggcttacgatggaacctatcacgaatctaagaggttggtatttccggggcaccgaatcttcgcggatcccaggtacgggtggagacgctagcctactgcccaagccaggcgggtcctcaccgggcgaaaacatgtggttgagaggtgagaaaataaatggcttagggtatactactcgtcacggctgctactactactagctgcgtccagtagcgcggccgacacgaagatgcaccgggacttgcgaagaaaacaagtgaattggaaaacactatctgaaggccaacgaaagaacggcaaactccgtacaatggcagtaggttacaggaaagcaccggctcagaacggcgcgagcaggaagccaacggccccaaagactgccaggaaacacgacagtccaacaaccaccaggccctgtgccgcattctcattcacagggcagtcatcgggaggattcgcgctcttgcacaatctcgcttgccacgaggcctccatgctctcgaccacggcctcgctgacatcgatgcgacagggattaggcgagggcgtcggcgtgggcgtgggcgagaaatccaccaccgcacagtcgcggccgttggaccattcttcgcccgcggggacccggatggtgtggttagtgacggtgatggggacggcaaattcatcggggcaggagtctcgcgccgtgtccgtgacgatgtcggctggcgccccgtcttcctcgatcgtgaaccaggtcgaccaaccggtggagttggtgatcatctccgcgcgcgggaacatgctggtgttgaagagggcaaactcgttgcagctcttccagtggacgttccaggcgacccgccagcggccgggggtgcggaattcggagaagtaggcatagaagaaatacgggtctttgctggtgttgttggtccagtcgatctctgtcggccagtgcacgatatcgctcatgttgttcgcgttccggatcatgaacgagatgtccaggtcgacgagcggcgccagctcggggttctggaccccaaagactacggggaaccactcggtgggcgtataagtcttgttgcgggggaagaggaggtccgtctcgagcatgcctgatgcgtgcaccataatggcccccaggcaggtggcgagcatccagctgctcgcttgggaagaaggcatggtgtggggggagctactcgagaccgaaatgagggaatgcccacaatggtcactcggggtgcaaaaaagcagcaatttactttataccggcaggcccggacaaaccaggggcgggcctggggcttgcttgcatgattcaggggaaactcggttatatcctagcactaacgcgcagtgcagactagagtagcgctgcaacgtctcgtgcgttagtggtcttggctgctgcgtgagggcatcgagcggagtggccagcgagggctcggcatgttggtagcggcacttggcggctcggcggtccagggtgttgatccccccagactcgatcttggccgtggtgggctgtatgccggagtaagcgaagccgaggcaccaagacgcccagccaatgttgcttgggtcgtttttgagcctgtcgcttggcacccatctggtcagcgtttagcctccacgaggaccgaaaacaccacccatctccgactgcaacccgtccatccgtcgagccctccactggctcaactattctcgaaccagtagggaacgcagggcgccaccgcacgccaggatcatgggttgtctccgcgacgagccgagatgtcccccgatccaggcccaggtcgctctggagaggtatataaacgaggcagatatcggaagaatccctcctcgtatcacacatccttgtcaagaaactctcccccgtcccagtcaccatgcactttccccagcttcttgtcgccggactcgttccggccgtcgcctcggcccgggctctgtctcgacgcgccgtcgattgcagcttcaccacaagtccgtccagtggtgataagtgcgacagctttgcgagcagttggggtctcacggtcgacgacctgaaggccatgaaccctggcatcagctgcccgaacctcgacaccagcaagttttactgtgtgatcggtacggtcactggggagcccgagcccaccaccaccaccaccactaccaccgcgccgaccgtcactaatgagcccgccatgccgggcatcgtcgacgactgcgacgggttctacaaggtgtcgccaggcgacgaatgcgacaccattgctaccgaacacgggatcagcaaagcccaattcctggagtggaacacctcggtcaacgaccgtaagtctacttatttctcccgggtctcactccttctatgtcccttccccatgcaaagacagacccctcttagcaaaggcccaagtctaactaacgctctcccgttctccaacccacagaatgctccaacctctggctcgactactacgtgtgcgtgcacgttcccggcgccgccactggaccgcagccgcagatgcccgggatcatcagcagctgtcagaagttctacaaggtgaagtccggagacagctgctacacgatcctgcaagagtcggggacggatctgtccaatttccggaagtggaatactaagattgatgcctcgtgcagcaatctctgggtcgattactatgtctgtgttagtgtgtagtctgttgtcttcacggatgctgtccagtcggctcggtcgactacaactgtgcattatgttggtgggactggaaccccacatgccaatacatgccacgaccgtggccccgataggattagttcatatcaacactcagcaaacatcggctcagtttagcctctggccccgaccctctcgtatttacccaaattacatccgctgtagaacgggagggacatctggagggacacatgacggagtccatccataaataatgtagatactaattccatgaggcataccgtttcaagtctgatattatggaatctatgttcttcagtccgctataacggaagcaggagcatatacacaattagaggaacttggagacattcatgtatgtatgatgttcaacggaagattttataccagcctgttcggtgaatcatacccttccggacgacccttgggccgcacaggaagcatttcatcaacgacacgtcgtacttcttcaacatgcctgaaatagacgccgtacaacttaatggaagtaactggcaggacctaaatcgtctggtggcccaaggacggttagccttcatccacgacgacgacgactgatgatcgcgggaccgcaagtgtgcctggctggccgaacgatacgcgggatctgcccttgactgggtagtcaccgcgtattcggaccacccggaatacttcgtacattacgataccttcgttaccgaaacgcgcaacgccttcggaatcgccgataacaacaccatggccctcctgagacatgaactcgaccagctccgatggagcctcgatgtcccggtggtcttcgccgagtttgaccagcttacccagagccttggcatcacgagccacgacgttcgggttctgatggtggaacaaaaactggcccacttcatcagaaccctgttttcccagcaggtactatctttctccaattacgaaactataagagaaaggctcaactgcatgtgggccagagacccgaatagaagtgccgcctcacacgccaaagccaagaagccacgatgtggctattgtggaaagaaaggacacaacgtcggagaccgcagggcgaaaaactagtcacgcaccgctaggacgtgtggacgccagcgcgtgctcacgccaatacagcaacagcaaagccaggagcaagtgaactcctggctgacaaataaagtcatcgaaccaatcaaaacccccgcactcacgaacaacctcgccctggtgtctaaaaaggacgggcgtgtccgggtgtgcgtcgattgtacccccgccaatgaagtaacgaaagatttcgactggcacttgccgcgcctccaagacgtccgatatcgcacccagggtaaaagctggtttgcgcgcattgatttggaggacgcgtttttccgcatcggggtgccagccagatccaggcaacttacggcctttacggttggggggcaaacatacaaattccgacgcatgcccttgggcttgaaaactgccccggcagtctttcagcggttcatggatcacggactctcggagttcgccgatgcaatttggtacatagatgacattttaattacagccacctccggtcagaactcggctgaaggaaatgcgctgcacagtgaatgaacaaatcgatcaccgagcgccgatctctgcgaatcggaactttccgcgctctccgccccaatcacaaaagcagaaagaagcagcacagagcggcccaacgtggaccgaacgcaaggcaagcaacataacaaatcggggcctgagcaaaaggctcgagcgcacgaaaaccaaacataagagagtcctcttcccccttacttttccatagaatctcaaaaagcggttattatttcctgggagctctaaccacatttgtcgggatacgcgcgaggcatacacaatgggtggagatacgatatgcgggactcacatcgcatctgggatgtatacgcgactttccccctacaactgggcctcaaaatccgagaaaccggcaaataattcatatagcagtgtagcaatagagcctaggggacccacttcagggttgaacataccacatgtcgtatccagagcattcggtcttgaagctcatgaaccctacccctggctgttcagacatcggccccgagtttgatcgcctgaaggacgtcagggcgatatctctcaatgcaaaacgtgtggcttttgtcgaaaaggctcattcatcgcttcagtcacgaggacgtttcaagcagcgggattgctacaagaggtctctccttcattatgctgctatggggaactatacaaacccccttctatatcttctgcaaagcaagccggttgttgattctcgtgaccagtgggggcggacagcactctcctgggctgctgagtacggctcattggctgtagcgaatattctacttgagcaaggggcaaacctcaatgcctcggattatgagggtggcacaccgttggcatggctgatacacgccggcaaccctgaaatgataaacatagcggctactgaggcttacctaagagagaggggcgcgaaagaaatcaaattgagaggcatcaagtgggcctgggttagggttttgagttattctcgtttactccgatacattcgcccccgtatataaggcccccgatgaatgggaaagccgtttctatactatatcaatacgtatattagatggacgtcataactgaggcagccggaaagcactgtggcgagaggttgggccatctgatttcacactcatgttttctttcgtgtaaatttgctctcgttgaagtagagacaaaaagcaagcaagtttatttgagcataatagatatgccgatatgtatttcattagtaaaaaccctagtcttacctggcgatacagagctgtaggctaagggtacacgtactcgtttccactttagcccgtagcgaggctggtacattcgaccccgaactgtctactagaaggccttgacttcatgattctcgtactggccatattatctaccgcttcaagtaaaactaggtcttgggaacttcgttcagtatggaaaaggccctgagcgatgtttgggagcaggagaagacgacatattgattgtctattctgttgagactgtaaaagcaagccggcttgttagtaaaataaatagaaacagtgatgcgactataatgtgtgtaattatatatatatatgatcacaaaatatgttgaacctacaaatccactcacattatactgtctactagtctcaccattaaattataataaaagcaatatatctaataaattatataacaagatacaccgttattaggttcgattacctactataccagtggttatggcggtaggtgacagtgacagacgtaaatcgataaatccacaagttgaagttgaaccccctattcaggaaacttacataatctgagggtggcatggaccgatggcaaggcctagacgttgaccacctttttcaccgcccgaccattcaccaccacgctcatcactacgttcatcaccacaaacacacacatcaactcacacatcaacacaaatcaccactcacatcaccacacacatccatacgggaggcaccctgtcggcagtatgggctattggaaataatgccatttgcaaagttcatcattggagccccgataccacctcagaaagcgaaaccatcaaattcgttcaaaaaatggcaccccaggtacagtacgtcccgaaactggtgcaaccgcctacatttcgattgttccacaaatcctagttgccaagacacgctagtctatatcaagagtttttccggagtatccttgtcagcggggtacgtattatttggtgcgaatagtaacttgacatacagcggaatgtattgtaatttaatacaagtgacaactcgatacccatcttgatactcatcgccccttgcacggagatcttgaacgattaactacagtaccgtgtggcaagttcgaaactaatcttgctatttgacgaatacaaccttttcttttttttttgagatttagtgcacaccttacttaatgtacctgatctgcttcttagtagtatttaaaagctgaatacacaaacccgaaatagtctagctgctatgtctctcagtggtattttatttgatggtacgtatgtaagtagctaaagttgaaaacggaattccgtacctacactcaacagcttttgttccatccgtgctttaaccgaaccaaaccaccttatttcttgttcgagcgctttgttgctagtcagtatttgtttcataatcgctttaaatagctcgcttactctgatccgtcacagtgacatctctattagcagcaaagaccacatcctcagaaagctgccaggacctagtagcataggtcgtgtaaggttcaatactaactatttttccagtgaaattctttctagtctcgccggggcaaagtaaagccaaagattcatcagtattattttcatcatagagtgtcaatttcacatcggtctcatttgacactgtgatattgtcgttgataaactttgctgtaggcatggtaggagtcaatatccgtgtttggtacaacgtcgtaatggctcgatgaggaatccgatagtgaagcagtgtcttatggaaattcatggtgctgctaaaaatcgttgcgggcattatgggtgggactccatatatattgaggtggattctaaaacgtcataatgatcatcagctgctgcatacagtattgaaacactagatacatgatgtatcactgagcgtaaagtaccgtattgataatctaacaggaatattgatactccgggcttattccaattacggtatagtatatcttggcattagggaataagagacaatcgaagagtgtaatggttgcaccggtttcgggacgtactatacctatacctgaagtcatcacttcttgggtcgatggggagcgatcttgaacacatcaactcacatcaccacacacatcaccacacatcaccacacatcaactcacctcaccactcatatcaccacacacaccacacacatcaccactcacatcaacactcacatcaacactcacatcgccactaacggttcaacgcaacaagcattccaagacaacactctcatctctgtttgcctacatctgaatggaagatgccaatttctttgtagcgaggaagctattggattgcaagactatcaagggaacggaatgggaaatacatcctttgatgatgaagacgccttcagtttttacattatgattttggctattgaattggcaaagatctaactaggactccttctatgtatccaatgatgacccttcgggacaatgaacagatgatgaagatgttgcgcaggtctttgcttctccgaatactcttggaacactcgaatactggtccctagcaccacgaagaggtgcctgcacgggctagaggcgcttgttgtcgcagatgtccctgcgaggcgctttgttgacgcagggcctaggctgcagagaacttggtaatgcagcggtctcctgcagagaacttggtaatgcagcggtctcctgcagagaacttgttaacgcagcggtctcctgcgaggattgttgttgacgcagacctatcctgcgaagcaccctcttacatcgctgggctcgtggcagcgatagccgtagccacggagacgctcaagcccgcaggcaagagagggacattgtgacacagcggaacatcggaatgtgaggactgaagtcctgattttttttggactgggaatccagctccttttatatttctccggctatatctctataatggaaccacttgtgcagatggtagcgagaaccactctcgttgataagcgttgaagcgatttgaacgatgttgaaggggtgtttggagactttgtggcctacagagtcaagcctcgacctggaataattcctcttaaaattgtgcgttgagtgtggtgaaccactttcatcggatgttaagaagagagtaataccgtaaaagtatgatttgtacatatcattgaattttcaaagaaatcgcttaacgcgcttatatactacgtctcctagttttaaccactgttaccgtttctttcatgagggttgaagtgcttcgacagatgccgaaataatgggctggagatagccgacggaaacgctgtgctgtacctgcggttggccggaggaccttttggtctcactagaaccaatcctgtctatctttaggcttgcgccgctgaatgttatttctttcctttctacttatagctgacttaggttgtctttactaaaatctctactccctgggcgcgtaggccttggcatacttgcaatctcaggatgaagattgtctttctttggcatgatagccaaaaagggcccagacctttgaaaagctcagataagaaactgggtctagtttctaggataaccatgtgaactgatacaactaaggcccacgagctaggctcttgtgatcgccaccccctcgcaagattgtaacgctactatcacactgatgagaccctggagacaaatagcacccgacgggctaatcaaacaccacgcgagaatttagatagacacaggtagggttctgcgatacagatcttagcggagacccacgggatagtagatcagggaggttctatttgtggagagaaaatggaaacaattgcaaaggtccagacacgatctataagcctaaagttggccgctgttagtatccgatggaacgggagattgttgcctaggaggtactgctggggcaggtgagtatttggaatagcacgtagactttggcgatataatggtaagctataacccgatccgtggttgtgttcttggtcgcagttatgagaaggtaagttcccctatcaagtggcaagctgaactttgcctatctggtctgtaggacgttctagaagctacgtatcttctcctgcaataagcctttctccgatgattattgctctctttggactataacaacacttcctctccatctctttaaatctaccgctatttcaataactctagcagacggtaggctacaactcgatccgtggttgtgttcacttggtcgcagtgaagagaaagtaaattcccctgtcaagtggcaagcagaactttgcctatctggtctgtagaacgttctagaagctacgtatcttctcctgcaataagcctttctccgatgattattgctctctttggactataacaacacttcctctctatctcttcaaatctaccgctatttcaataactctagtagatggcttgtaaagaactataccaattatggacaaaaccacatgagcttaaataaaatgcctccgttttactaaaaccgattggccctggacaatatttcgatgtaggccggccctcctgcggccctaaaccttatttcaatcgatctgcacatcttgatcaagatgctgaatttaaagaaactttctaataaaatgttggccttaccgcagtaaatttatcctatataccgcccggcggagattatattgtttctattctagttctcattttttgggctgtaaggttcagtcacgaacagaccagaaagtgggcagaaacctaggcttaaattcttcattaaaaccgcattctctcactgagcgagcatttccatagtttatcacaacaaactctcgaaatgatttatagtcccgttcgtggttccgcagtctgtgtcaaacttgatttccttgtgacttacgcgtgggtcgaaagcagatcggacgcttcattccaaagatcactccgctcccaaccaccgatccaattaaatccaagcggacatgtttccttaggctaacaaaaacccatatatttttagtcttactaccctgtcctatctgcttataggaaaactcatagtactgtgaatccttatacactatccgcagtattttgcaggccatataggccatgcccctggtttagaatgacaaggacgaaactatgtagctgggcctgctcagaggcaccacgatcatactcgaatgttcaccttgactttggaactttcttactactgttataattccaaataagggtgattgctccttcctatataaaatccatggagtgatttatatctcttatactaatattcattgtcgagtaagcacagcctttatggtaataacatatacctggactattttatcgaaatagttagccactgttccttcgatatagcaatatagcgctccgtcgataatatactgctagtgtagacattctgttcgcctgtatctcagtttcctagcggtatagacacgatgtacatagtcctacatctaggacgacgatcgtgttctttgaggtgagtacggaagcggtgttagcgttacgcagcctatggtaaaaggtcagcctcttatataggaagaataaaagtatttcatacatattttcgagtgtgccgtttgagctggtttatcgctgtcgccagactggcaagggttagccgctagaattgtttgaaaccatttgttaatgttcctttgggtagaggtattgtctggcagagttaactgtgaaccgatattgactagcgagcgctgtatatcacctaggcgcttttgttttcctgaacgaccggggactttggcgctagtacgacgctgcttctgcagaatatagtactttttcccttataaagactcaacgcttcgatccacctaatattctttataatatatgtcagagagggctttccacgataggccccgatgggaatccagccaagagagaaggtttttctcttcctgttctagccagctgtatgtgctacgtagggacatagtgatgctcgggtaagttacaaaagtgggaagaacggttgaataaaacagtagaaagtgaattcgaagaggaagggttattgagtttaaaagattatagtattgtacataaatatagcgattgcgtttatgagccatggcctagcttagtgaatttataccagactcttatgactcgccctagcttaagtttctgaagtccagaagccttcaacttttgatatactatatttcgttaagaattaatcaataacgttaaacagccaccgtatacctattgataatatcatatggtttcactggttcgttgaaatatatcagactcttagtaagccatatagtaatcgaatagatatctatgtatagaatcagaatgcatgggtgaaaaatgtgtgcgcttataattcccgttatagtaagtaagcataacacttaattctagtcctgcgatataacttgctataaagccggagtgctttcttctatcacacttaaccagaagtaggaatacttatcacctcagtgtaactcagacgcagatataggcggaattcgaaaagcctcgcgccctcttcgatgaccagactttcggagcagattgcaacgtatattgtctttgttatccttagagtctaaggataccggcagtgtgtctagtaccgctatagaggatacaataagggacgagttaccttaggaagaatacgactctggcgaccaggaaaatagtgacatagctgataagagtgagtaagaagctatacgatagcagagaactgtatttggatataaaacggacttggaaatacgtaggcaaactcagctatctagagatagcaatacggttgctcttgaacgcctgatagagtaagtataatcctatatggatataattaagaattggcctgctaataatatctagactagataaccgaatagggtcagctgctgtcgatactaagtaagaatgtaaagtactaaccgtctctgtaggtctattaagcgcttattgtatgaccaagctacctagaatgaaactatttgtaacgatctagtcgatatcttaggccgattggcaatcgtcgagactgaggtatagaagttgaatagataaggtacaaataaatctatagagggccagaagaccgggcgatccctgcgtcagcagcagtgatgtgacccaaactgtgttttgatatctaactagatattccagagtaaggtataaatctgtgttagtcttaagttgtagatatgattattttactgactgaaaatattactgaatatagatactcttattatagatactaagttggagggttactggaaaaggtctgattaacctaatacgagctggtactagacgagctatatatagtttgtcgttgtatttaggtcttcgaattttattaatacttgcctaggttgtatatactaaagctatcttacccgagccgagtagctatagtcgtgacctactatatataaacgagtactttaagccttttattagttctactattgtagatgatttgtactatctagtctagtataattgtatacggtttatataactggaaatatgccctaaaggctaaagccacagtagtatataagaattatatgctatataaagatgattgtatattggttgcgactattaaggtgcaatccttcgcgattaatactagtagagtagtttaatatacctggtagttgagcaattgctatttgtgattgagttagattaggatatactacggcaagctttagattaaggaatgagaagagataataactatagtgcgtaagagaagcgggggtttctccattagacctatagtaataaggcctagcattgtcctaatcggactattaagatacattccctttacatagactataataaatatcaattccacagaccagtgtgccaaggtctttcccatttctaaagtgtatctaagcggtgtgatactaaatctattccgactgcgtctccacaagtatcagtcccacctacttattacatttcttaatgtataaaaaacaattaaggagtctggaattagtcggcctagagagtggtaaacctgccgttaacctgtgccgaatactgtattgagacgcctgtgcttactcgtactagtggttcttagaccaaggcgcccagcgatattcttcggagtaagaaattggtaatatatatacttcgtaatcactactcttagaatggtttggtaataatgttgcaggaagcctattcataagctatctgtgcgttaactctattaaaaaggcaattctatctataggaaattaagacccagtaagtctaacgcagatattcgttcaaatgagagatctgaattggttggtcgcagacggctcctactggctaggaagtgggacattcaattcagagaggctaaggagggtattgtggccctgagtaactgggccgctttgctcggcctagtccgcgtggatcactccggagcccggcaaataggatgccagttatctgttctggagggcatcgattgtattccaaaatcgagtggtcgtcgataccatgtccccgtgtgcctgatctagaaccagctgaatatcattctatggtacctaatcctatagagcggtattcgtagactctagctgctgctgtaactcacagatcttgtgcctaacccgctgactgttagctaatgccgcatctcttactgctatagccagctgcaatttcgaagtttcttcggttttctcggctttaggttgttctagcaattggcaatgtttatatctttcctcttctctctcctcctgtgctttttggatctcttccttaacgatacttatcatataaagatatttcctataggacactttattatgtttccgcctagggtttcgtgtttttgtgatagaggatgcctagtatagtcagttagaagtacgttaaggtagttactagggcaataggggcaatgttagccaaggaaaatccagaaaatattgtagaaggtagagattggtaccgtatgcttatgcaacccagtcgccggtttaagagggttccgattgtgtttcgatctagactgagtagaccgaaggggataataggaaggcacagcacgcagctgtactttactacagtggtctgcctattcccagaaagccttataattctttgccatactaagtgtactcgattgtaagatgaacaatagcgcaacgagatatagaatattaaaagtaatataagaagtgagtttcgagaagctgaattatatagtacgaggagacccaagtgtaggacttaaatccgaatgaaaccgctcttactcctgcctaggacgtatgccaaataagggttataatcctaagaaaactgagcactgggcattagtgcgaacgtacaaaatacctaccgctcaattatagagggtgcgagctataggtccgtataaatatatagttgttacatacaaccctgtcttataatagaaaggaccaatcggttacatcccatctaaagtgtagagctaagagtaaaatgtcatctttcaaatgttttgtgaagtttgccgactcctaggactatctattagttagccctagaaaatagcggcgttgtctttccgaattaacagttctaagtttcctgtccctatacgtctagattccttaataagccgttacttgagtcacaggggagaggcatttcttacggctaagacttagtagtaagggtatcaatctagtatccaccatagtatagatatgcttagagggataggaacctctagtgctacgaatcaagcggcagtcatagcaggtatataagcatgttataattatcagtttaagctacagtataggtctcggccttcactagttaagagttctgctatcaagtacctaactcgagactcctatagctcacttccctagtagcctacgtttatagtctatagatactatatatcacgaggccggtattagcttaaatctagataaagttggtaccaaattgtaaggtgtattattggaggtatatattcactgttgcctttaacgcataacaactagggtactcagtaggctattagcgcatatgggatctctgccgcgtactcccgttaatccaagatctcgctcgctaccttatagatgccattggctaacgattggatatcgcgtgtactaacttcgatctcaattccctccgtttataataagtttaatatccgccttactctagcgattcccgctttcgcctctgttaacttattatacagtttcttattatacgaccgaagaatttgtatatcgtggcggagttcattagcctcagcccagaccgtataacttttattaagacagtcatttaatcgggcataagtgcgttccaactcgatttctatgctactattagcagccttaagcttagaaatctctgctataaaagaaccatccattccgttactaaaactctccacctccaggctctatcagcaatgctgtatcaataaggatatctagtaatactcacctcccttagaatacagcttgtatttgactataagtgtcccaacgcatacggggaaatagcctcgattgaatggccgatcttattacaaattttccggtaaagataaatcttaccgctacttaagctagatttaagtatactagcatttgcgctcatgacggactaagcgtatctatcttcaggtcgcggttggagacagacttttttaggagcgactatgatgccaagtcggttatctaggagtattagctgagttattattagtagggggccacgggtatatatattggccgctagggcttcttaacattgctgattcagttttaagcgcttctcgttactacgcttaggtatcgtagggtaccttcagcactcaaagaatatcaagggaatagggacgcgggtatttagaatataattcggaactgacccttccgccaaaataccggcttaatataggatcgataattcgttctttctcaagtcgaaagtggtatccgtaagtggggcctaccagtatccattaacatagggtaaatgaagtttcagctaacttagattagttaagatttggttgaaagtcgggtataacttttattgagacctcattaagtaaactgggctactgaaaaaaacacaggaaaaagtaacctcaatttctattcaaatatatcctcaatcactaagttttggtcggcaaacgctggaattaatttggttagggcgtctttgcgctgccaaagatttctgccttctaaggtgccggcggaactgatagtaacttaatagagggtggaaagctgatacaactgagcagactgtcgggctcgctaacaacatccccaaagatccagcaaaacatatatataataggcagggttggggcgactctatgtcttttgtgccatctatctgttaaaattgcaatgactccaacagctcgccggccccgccgccaaagactagccagcgcccatgatctgacgccattactgtgcgacccctcaaagcttctgctatcaaagatgatcactcgccatgccggtcgtaacattcgcactgactcatcgagcccaccttcgcagcgagccaagaaggttcttgaaatgagggttcatcatcgatttcatggctcgcacgttacgttcctagaaggacagcctggcagaccccaaaggaaaggtgccaaagaaaccccacgccggaagggagcaaattcgcagcgagaggcaattcgattggattggatgcggcgacttcgtcccaagccccatagacgttgctagatcggacaaggatagggcagacatgaagcccagagggtggcatgccgcaaccactaatttcgtcatatcgttgaatagattaaattgactttcaagacactgaggatgacaatgcagtgcgtgatgaagtagcccgtagaaatggactctatgtaggggattgctcagctaggcatcctatcgattggtatacgcaaaaattgccagtatacaaaaggatattctctacgcttttatgatgcctgttgtatacaattgcaatacaagtgtctactgtagaatagtagaattcttggaattggggcgcatagaacgggccagaagaaatgtacggatttaatactgattggttgcacgatatgtgtgccattatccgtgccgttctcgaaattatatacagagttcaatgtatgtttctacgcaagggactctcagaatacatattcttcaaagcgtgtatcaccaaattgctctgagagagatcatgctattctacatgcactgaagtaaggggaacggagtttacgctgtagccagagttcatggggcgtcatcttttatttttctttaactaatttagacttgaaaacgatccgttgtgtgattgattcttgcggatattctatcttttagagacagcacaaatagcaacctgtcaacaaaagaaggtcgccattttactagtgcgcccgaagaacattcagcaccccctctgcctgatgataaggctctcaacgaccttactaagcccatcccctatttattctgcactttctatagtatacaagaatcacactctcaagtacccgattggctatgcccgtactagtccgtactgtaacgaccacgttccgacacaacctcctggtttcagtgatcttatctgagtcatccgtccagtggcatccacataccataagctagtagataagaaaggacccacctatttggctcacgggattgactgcaaggacaacgcccagatggcgataatgaccagttcgacctatttagtgtcagcattattagtataacggtataacgtgggaatccgcgattacctccaatgcaatcatccacaatctctccaacataccaatgacagcaatcacaagcaaaagaagtgctattgcagagagataacacgagatacaccgcaacttagctcgaccagcagttgactgttaaaataaacaccaataccatacaactacacaaaggtaatccgctaagagaatatagaggctacccagataagcagatttcaaaaggaaggttccaacgtgagagactactattttcgccaaagctaaagccacagagaaagaagggcatataaaacgcagtaatcgaggtatgagtgggttttcgcgctgctggaagattatgcgaatgtacttcagcattattagctcaaaacgaagacactgtatataaccgagttcggtgtactatcaacttaccgcttatagtggtgggaatattggtataatccaaaagagtacttgactctatactggaaacctattactccagaacaacctagtaaggatagcaaaggaactataagacaaggcatatagcgctaaatcgactttataccaccgccagcgtgattagatacaatataaaagaaatagtcttccaaagttgagaagtagaagaatagtcaccaagacggatctgatgatattttgtgaaaccacaactatacttaactgccagttaatatccttatttgaacgaggtcttgagatttatatactgtgacagagacatattggctaggtaatagtggataaattcctaggatatcttcatttggctctaggattttcttatactgagtttcctacctataaaaaagcagctgccctcaatcttataacactaaaggttaactgaggattctcagttaaggcttcggggcaacactcttactcttttactacgcagacctgagaaagactacatttaaagcttacagtatagtttctgatttaacttgcattatataagaccatatttacaagggccaatcacagttgcagtatcctgcttttatatagatatcgaggatatgcagaggtagtatatacatttataaatgcctaactcaatttctagagagtactgccattctctcaggactcagtcttcggacccgtagaaaaagtaaagtatgtgctcgctacaatatacctggaagtcacacaatattttaataaaacagctttacctttaaaataactggaattagctatagagtacacagtgtcttgaatgagtatatcctaggggcagtttttatataccgcggattctccgtatcagtttcagtagcctatggttgcctgccctagacggactcattagcttattgtgattactccttaggccgaaaccataactaacccttacttaagacctatgatttaataatgttttatcatcggcaaaatttaatatatatctcctttccaaagggtactaggatcagaaaatgcggagactagggttataatatccgttcaccgtcatgatagtatcttgctattcgtcggtactctatataacggggacaaatggatagctatatcactaaactattaaagtaagcgaaatatactctatttatgggttttaatcgcttataattttcactggcggtctaaagtacatatatattgtattggccgataagtagttattctaatagcgtgaagttaccatattagcaataatatatagactatatttccattttctcacttatatcagaaggttccagataataggttatataaggtatcgttaattggttcctataatctatagtatacaatatgcaaataaacgtcgatagatgtgacagaaatacttctactatttcaggcaaagtcaatccacttagaatgtaggactttttaaatcggccacgtttctccttattcctcgaaaaaatatacgcagactttcctaactaagaaacgaaagttaataatataaagaagagataataataaaatcgaaaacagtatcgggatcaccgcgacgcagacatttcatatggtgaataagtcatacacttgaatgttaacggcttacctagacagtagaccgggaataaaccgaacgatagataatatgacatgacgtttcatgtatacgagcctttgtagtccactattactataattccatacactcgatatcaagatatataaggaattgctacctataataccgctttagaatactctacgaggctgtatatcaagattaagtatatactatagagactgggctgccagaactagaccattccaattttcttaagagggcgcaaagtgtacagagtataaccgcagaggttgagaaatactagtctgccgaatacagtggctaatagagagggagcgtggagcagctcggccaatatatgaatagacggtactaaggctaacaggaccactgaggtaaattaaagagacaatcgggcggaaaatgcccctatatccatatccttgagatagccgtccgagaggcttccaaccgcgattattataaaagccgatacacacctaagttatagcaatggttaggctaggaagagaaaagcgatcgtaggaagagcggcggtccagaccaggaataaaccaccaaactatacagaatcttgctctttcctcattttctccttttagaatacactaaagcaattctgaaagataatatacagatactatatagcacttcctctactaaacgccatcactgttagagcgtataggattgactgttaagataaggggaaatggaagatcaagaacataagtagataaatgataaagtatgagaatctaagcgtgcctataataatacctatggcgcagttacacaggtttcggtaatcgagcgtatccattatatagagttggggtaagtaccggccctcttaaggcagtatccctcaggcgagcatttggctttatagataagagtagagctcagtctttacttgttaaccgtgggttaggtattacaaaaatatatatattagaataatgataggtacaatgttaatcaccagaacagtaaggaactattatatctgtaataaccacccaccttaacggccggcgcctcagaagtgaccatatttatattatattactagaaactctttttttgcctcattaatattcaatctaaccaaccgactgacagtcctccctaactatataattggtctctcttattatacaaatgtaagacctaagagttcgtgattctacctctcttccataatagcactatggaagatattatatagattgtacgctagatcggttaacaacaagcacataatatatattatcgcgattgctattccctctttaagctactctaagagcttacagaatatacgtttaccgaactacaaagactttacaaatccggcactgagcgctcaaccaattctatctatcaacttctccgaaattatcagaatataatctataatctagttgaaagagtatgcgaagcctaagcggaatacaaggagttctgctcagtgaatgaatcacactcagcacgcgttgtcttcgagcctatcaggagaatgtacaccgacccacaagcctcattgcagggtctaagataatggtagaactactatcctagtatcgtcgcctagggagatggacgagcacaactggttactctactatagagatattttctaaggcagaatttctgtaattctgtatagccgcgtgaaaatcataatgtactttatataccacagtatttctctctaaaagctcatataccatataggagcccaccaatacaaagatacagctatcaagaagttccgattaccacagaatatatactataaaggcgagcaatgtttagccccactatctgctaccgtccttatatatcattccttatacactcccagccgaatgacaatctacgggcttggcaattagatacaacagtagaaaagatggaccaaccatatggtggaactactaatagaaaagaacactgctaactatactgtggtaatcatcttagctctaaggataactttaacgccgtaaggctgcagcgtgttcttaaccttagaagcaaaaatcccatatatcaccgtgaccgcaattgtggcagtcgtaatcagtatcgaggaaagcttaatttatcagtatgtctcttcaatatttgtccaagtatcacataccgtataaaatatggcaagtgatctgctgccttttgaaaagaaaactttgcgataagccaaaactccggataatatggttaccacaaacccagtaatatacaaatagaccacactctgggaaaaccgtcagtagccggaaaccaagcttaggtcaatatctagaagtatgttactgagatttatagatatggaatcaagcacggcggatatattaaaagtaaaagagatgctagggtcggaataaactatctccgagccatccttagctttacagtagctctagaggccaactaaatagtattgaggcagatatgacttaaattcgtgtacctgggcttcgaccatactgctggcagctgacgttgccttatagattgcttcatttgcgctagtatagatgctagataccacacctttaacggtatttcttcccccgctctcgatatgcgcagtattaatattagataggtcccgaatttgtaaatcacgtagctttagaaattcttttaggtctacctaccgattgcttagcattgattagcatagaagtttttcgggcgtatcttacttttagaaaatgtagacccttcggcgaggaagataacgaacatccgataaagataagagatagatagactagaacggcgacggtaaataacaatgctgtagttaaaactagcgaatccaatctgctcttggtggaaagctttatagctttagaaaggagaagataaaggagtgtctcttaaccgaataatagactttgagatcgagagaacaattgagaactatactatatcgcaaattagggaagcatttatataaaatttctagatatagtcaacttaaccagtgtaggcagtattctataaatttaattgagaccggcgcaattttctgcctcattctataggcagtagtagataaatgtactgtataaactaccagagtatcgggatctataatatatagtattataagggcaggcaggtaattaacagtattaatcgccggaatataagggtatgcaattataagtgatcaggctggcaagttagatctttagcctacaattattcttagatagatttaataattaaggtggtataaatactactgtacagagtgaccctcgatatctaagttgtctttctcgttattctatacaccttctcgcctataaatcgcagctgacttatactagcccccgttatatcattttctaggcagtcagaagttgaatattaggaacagaaattatatgactatcgagaaagttattttaagctatctaccagagtgtatatctcttacctcatcttcgagagtaggttcagaagacagatggacggccggcagaatatctgtcgattgacacaattgataaagatataaggctgtcaacgcctaataagggacaactacgtgccggtaatagtccctagggcttattggtaagaccgcgtgtggccccgatctagcggtagaattattcctagcttggatatagagctggactataggttatgcgtatacgaccacgagaaccttataacagctgtaagggatttccttagccataacgatcagtagtagattgttgatatctatctaacggataataaggaaggtgcgttacttagttttagctctcagagatcgtcattaataagtttataatgtcgctagacgaccacagaaataaagcggagtctattcatcacaaattcatccaatcgctaaaggagcggtatctaaatgacaatcgcctacctgatagactgatctacaagtggattaaccggtacaaaggctaccttaatatacctagggatccgctcgctacaaataactggtaggctgtactggaggccctagcgggaagtaagaaaggaaagtattttaaagcaatttttcaaacataagaccttataccaaaagctaaattctttactcattattctgggtctctagggagggatacggattaggctactttataaactaacagctatacattgcaataaggtaaatttactctaaaccacaaagctagttctatctcagctaacttgattgtaaatctagccagtagtatgctactgggaattgatcttctccactttttcgagactggttggaggaagggaagagcttttattactaattgacggagttacggtcgagctgcttcaatctcacgtccctaaaatctcctataaagatttgcaatccttataagtcgagttggaggagggctggcttttcccgaacttctcggaagaggctcggcaggacatataggtgcgtttaaaagagatcgattatctaattccaaccttgaaaacattttttaaagatcagctctatcttaaggtagcttaaagtatcataaagagactgttcgtccagctgcgaagggaaaagattactattaaccagggtatatatgggaagtataatactccggttcccatttcgatgacactgagataggaatggctgggatccgacctactcgaattttagcacttcagcttctagtatagatttgaaataaccgatcactaacgccttaaatagccgatagacgctaatctcgaggatatgcttaatcgataaagctccggatcgtctttcccccctaaacaggaaatacggcgccatttctttacactggtaagagcgagaggtttctaagcacctgttacagacaacacgtcagttataataggggagctaccttcccctagagtatacgaatacctagaagacttagccgaagaaatagaagttgcgaaaagatatggaaagccatactcgaatactattgaggcagatcgattcgctttatccgcagagacgctgcggcaaagtcaagccttagttcgagtaatagcggggtttctccgacagtctatttttaaggcgttctttggctatctatagaatagtaatagttaaatagccggtagtgatcctcctaacgataacattgaagttcactatcgcagcgaaaggccgactaccgcaaatattggtcgggctataatagccacagacggtatagatatagatcctaggagccttaggccaaaccctctcgtcacctcagcagcgcggacgcataatgccgcagctactactttaccagctaatatactgccgccgttcggtatcatgactatcacagttggaggaactacacgagtattagaccaaccaatctacaacttatttataaaagacttttcgactggtctatttaacaataacttcaacgtctagaccgataagagagaaaaacgatccatttccctatatacgtactactctcattatctatacaatccgtcgtcggtgctatacgccgaatttagataaaataagcatactacctacgctattatactctcgcaaatcggtgcggggagcaagagaaggatacttaataaagacgagcagatggctagagtagaaatatagttacaggagcaaattgcgttactttcggatcggtgtaacggtaacaaagacctttaataggtaccaaactcgggttttactaaggccttaaagaggctcacggtatagaggaggcctggtatagtagggatagtataagtgaggcatataaaaattcatatgtggttaatctatcatatctcggagatattcatctaaatggtaacgttttaccttaaagcgagtaagcctatagtatctatcttatatagcgctttagggatagatagtaatgtactttttgatttagtgagataagttatagttcgatcaaatataattagacatatacttggtgtctagcactgatcgttatttatattttatagcctaaacagcctgacacattagatagtaagttctatagcccgaggaatctcaatagcttcaactattctctgatttatatactcttcttctatttaacacatagcgttatacttgtagttcactctctggccaccatcaaggattctataccatatggcgtcgcttcaagtttaataagtgaggtgctgcctcttttatctcaatagactatggtacactccgccgactcaaatacctttactaacccagaggcgcaataacaaggaccacccttacaatagtccgcctccctaaatatataattagacaatacaacttaaattctatatcaaagagtagcttacttgataaggcaggtatttaggtcgagtttcccagaaccctttagcgagggtattgtagtagggctatatatctcgctaggtacacttagggataccgagatactcgcaaagcttaatatatgcgggagctcgcagctagagcttatagtataggtagcagacctagtactctcggtactggtgcttatctattattaagtgctttcgcgtcttatagtctctttattcagtagtggcaattgatataaataattgccctactattacaagggaaccttattaccagctaacctttctatatattaccttaccgaagctatcaggggaagttgatcgtctagggagactgcaataccacgataatcgatagaaggactattaatacctataaaggttagcagttaggtataatacgagggtagtataatacctatattaactaagtacactttctatcttagcctcgcagttaggcgataaggaaactaattacatatatctagaagttgaaagcgtggcattcaagcttcctcctatagcttggtgctatatactgactgtattatatatgaatggaatgaggggcctaagatcaagggcttaaacctgactaaggatagcgataactgtaagcagagacctgaatataattaaataactttagtatctaaagacccggctttggcgggtagtgctgcgaagcgcttttatattattaaggctcgatgagtatatttctaaggtaccaatttacctaagaggcgtggtaatcctatgaaagtaaaagaaatagagaagaacgacgggtggtacattattatgttggcatcactggcattaaagaaatgccgataatattaaaaattaatgctagcgggagaattaactcttaattttaggacagtatatttgtgcccgtatggctcaatttaagattctctgtatatgaagctataactttagaaatatactatttctaagacctaagagatatatattaccctcgatcttcccctctttaatggactttgtctatttccaatcaatatgatgagggccggtatagattctgctagtattttgttactacttctcgccgttttagtcgtaagtggctgtatattcgctctgcattatgtaggtttcatatactgactttcgataggttgtaaggccctataataacccaatctatacagtaatatccacctatctagtacaatccctagaaagcgtatctgcgaccgtgacctactaatatattttctagtattattcttcgctaatattcccactgccaaaactattgtacgaaatgatcatagaggtcggtccctattattaattgtttacaagtatctaataatcgcaatagtaaactccggcttatatatattcgcacagaattgcttatatagacgctacgacagagaatattgaccacttaagtaaagttagcgaaacctcgtgtaacgttaatgctggaaattattatcgtctgttatatactaacctatctggtatattcctttacaactatgtaagtactctaaactttaaggcaaatagggctccgtactgacggtactaagagcctcgagtatatcttaataaactgtggaagccttatacccctagcgacaaaggtttaataaatatgctaggtagacaacttttatacgtttagaataatcggcggctcttctcaaaacgcgagtgactcaattgacttttacttggtagttataggcgaaactatggggtatcctatagagtagtttagaccttacgaccttaccactaagtcggattggtattcgggatggaccaattaaggtactactggagcgtagcacggatgtgattcacatttctgtatattgattcttttagaactcttaaaattagggagctgtttttcctatatgtgcgctcgaaataagttttaccaatttgttctctttgattgcttctccacctctatttttattaacgctaggcctaatatagctagtgaatatttattacccttttcctattcgatagtaattgataggctaggctagatataggctgaggtgatctgactaagacttaggaaagaaccaaagagaataaaatagtgaaggaatttcgagcggacctgtaaagcttgtacgttagtaattccctttctttaaagtatcgaacgctatcgctacctaagaagcttcttagaatgcttggaatagcattcgccgtattgtattgtaaaatcgttaaaaaccagtattagccttaacttagttattgtgcttatgcttactgtatgaccgatgagataatacttcgacagtacttccgcctaaaatagtcaaaagcataaaacaaataatatcacgcatatagggaaggaaatcggttaattactagagcggttaaccctggaatattcaccctatttccattaactggccccttactacatttctcgagataatgctaaaccaataaagatcgaattaaatatatccgccttagggatagcttatttttagtcatctcctgcttacacacaactgcctttaataaaccgtttcgagatgtcagttcttcgagctctgcttataagaatgacaagtgtgtacgaagacgcgaaatccgttttaaatttcggtaaatagcccgactcagtcgtttcaatttgggccagccttatctctttagagttttaattttggtcaggatttgacctatacctaatagatttactaatggtacccgagattgcttggtagggaatatagtcttataattatccctctttcgctaaagtgcctgtttagactgcaattgagctaacagatacaataatatggctataggatctaggctgggacggtaaatatttggtattattgctatcaatgttcctaccggccgctccacttcattctcaacggcagtgatacgatgagttagagaggtattcgaaaagagtaaaactaataggatcatataactaatatagtatttatcggagatttggtctcgcctatctggtaacacttttgtttctatagctttaccgggattttagctaatcaattgatacctagaagtcataacctagccggtacggatgctatatgtacccacttgcgctgtagatatgttgaagctaaagtctaatatgacgtacggtagctgtcctagacttactgcgtaggactagtaatattaaatagagatcaagtattctataataactagaacggcgctacgagttttatagtataccataatatgaccgcggttaccgttatcgatctttgaggctaggccatttgtatcgctctcagtatcaacgggataaggattatactggtaggaagcagaattagaggtaggagacagtgaagccttattatgagaatggccatatctgtaccaggtcgactctgaattagaaggcgtagcgtatatatttaaagcacgactgtactgatgttgattcactgtaatcatttttactaccttactaccttaccaccttcactaccttcactacctttactgtcgctgagtcctgaatgggaaccactcttaggtatagattagcttctatcttatatacactgaacctagaattttaatattaaaatgtatcccagagtctagttagagaaataggtggtcttgaaatggagtatcggcctgatctagcaagattaatcccagataaatattgtgaggtattttattaataagttgtcaacttaagtattatttgaaaaatgcgagaattcagctgtcctaggtatgaccttcgctcttttttccggggaatctaccacttattgcgagggaagagtggttgaacctacggtatgcctatagagataacggaggataaagcagtgtataataaagatcccgatcaaagtaacactgcctctaaaaacgctgctaaatataagtaatgtgccctgctttgaaagccttgccgatagattactactatagattgctgtattgtgccttttatgatctgaggtttttgtggctgatgttggtctataaatagaggaattagtttaagagctagccagcgtgcctgttaacgtcctcgataaggtttggcttttatcgctatgggccagagataagtaatgcccagccgtcccagtgatacgattagtagtgccagaccattcggtgccagaagctctgttgctttagaaaaccctgctttatctggtttctctgatctcggaagcttcggtatgtatttggctagtcgaataatacagggactctatgaaaggtcccgatgagtccttagagtgcggtgtttctaaactagcctatacttgagatgtacgattgaatgcaaatggtaaaaaggtggctcttatagtcacgttctaaagtaagtcggtagtgttattctttaaattctcaattagaaagagactatagttattagaatcggtgctggtatatgatcctcttatggtaccggttatagaatctttttcggtaattgctccattatgcttgggttccgttataggcttatcaacaggggcgctgattggagaactggagtgtaataataaatcacagtataatggtcgatataaggctaataaagggaattatttcgagactagtgtgacgtaaggccttgattcctccttatatagtgcctggcttatctaaaaactaatagcttgagtgtacgttagttttagtgaagctaacgtcggctgtaagtcaataactgtcagtgatggtattcaaaggtaatatattgtctctgaaggctaggaaagtataagaaaaatctggaaagaggcctatatgatatatacgactgctgagcgatagctatgactttctatagcaagcttctttacagactgaatatatattgattaaatacggaaagaccagagtgtattaataagataaggaggactgttcaatatattaggtctctgggaatcgccgatataattctaagtttctagggctaggattgtggtaatataaaaggtatatagactattataatagttagttatgtctagtactagccttagaaaatgtcaattctgcacgttaatacccagccgcatatttttattcgctagactgtaatataagtcgtagtagtaaatatcgtttaaagttcctgcaaatggtaaccatcgttgaagtaatagattggacaattaggtcatcgcagatatctgatataaataattgtatctaccggctaaggtaaactaccagtctattgcagtaaattagtggacaatagcgcctcctctaagccgtgttaagtaagagcaactccgtaagcgttgtaacaatctactacgataccacaatgaattttggcttctatataggatgaaaagctagcttattatggaactgcctgatagttagatctttacataccactcctatccagagacccctccgcccttaagggaagatatagtaagacaaaattaatataagtattcgatgatttgccgctaattgtgaaagaaaacacggcttaagcccactattattcgaacgcctcgcgactatatttctgcgacctctactcagtcagttggcagagacatcccggtcttctgtgccccagttcgtcaggaccaaaaatgggaagctctggcgaatcatttgaacaataatcgccgtatggtcttgtagtaatataaaccgttttatacttagttagttcactttggtgcacagtgggatccgtggcgtatatcaagaaataccgatctcaatacggtggttaaagcaatggaacctgttcaacatagaagccgggtatgacatcggggagaatcaaaaccaatgtcaccattttatttctttgattgtttcttaaactctaagtctagtcacgccaggcctaatgtagttagtcgacgatgtactgctcatcgccctttcctattcgacggcccgaattggtctaggccagaagtagattggaggcgacgacccaaagaggacagtaggaaggctagtccggagcggataagtaaatttcagttggttgtaatacttgtcttatttcctacggccatattgggagcggatcataattctagtaaacttgggaagtttcagtattgagaggctctattcggtatatgcaaagggctaacctatctataggctgtgattggtcggtggttatggcccccgattgattattaacctcaacttatgccctcctttttgagtctcccaaccaggtgatcgaacgaggaaaaaaagttcatcttctacgacacattggaaccatcaccccgtatacgttctctctccgacgctacctacgcctaacgagcatccagcgatgtgggtggagtcgaccgtgtttcgcacttagatcaagagaaactgcagcatgacataagtgctgtaaacggaacgcttcaaaaggggctataatacttactgattgggtcactagaaaggcgatggcttcgcctcacgctgtgagtgggtagcgagccaggtgtctgccttgcagagaattgtcagcgcaagtcttcgtgatatcgtaatatatgggcagtgtgtactaccgactctggtgggaacatgattgcctttaatggcctggaagcatttctggtatatgactggccgtcgagcgctgtagggaaaatatgaaagtgtgtaaagtagcgatttaacgtgggttgggagggatggaaagctggagacggagcagtttctattcctctcttattacacagaatgaggacaaaccaggagaatttataaccatatgctaagttatcgaatgggttgaatatatcaacagcgtgcaacgggacccgtcaccaacacaacaaaagtttaccagcagtataggccttatctctccttaaggaaaacgcaaatagatagcggaaaatcccaatgccattttccctgcctcgtaaacgctctaccacatggagtctctatcaaggctcagcctcatcgacagagtaggcttaaagatcgctcgcttccaaggctgaaacaacaccattataaagagcctgaaccgctcgcttacactcccacaatactgaagcttattcattacagagctatagaaggatatcgctatcgcttgctagcaagtcatttgacgtttaaagctgtctctactcctcctcgagtcatattttctaggccgatttaacgacgtagcattgccatagacaaaagtacaagtcaagcaatctaagaactggtatagcgagggagtcattgaggtttactactttcatagactccgccataagggtaccgcgtgttctcactaggatctattcagtattagtaggggttttcattccctaccgtaggggatatgaccgaccttaggttcgatagttgtgccgtttgtaacttactgtggttggttttctaacttgggtttatcttctagagcgtaagatactcggcactgtctcttagccggacaattaataggggaaggcgaagtaggatggtccattttagtcattaagataaattggatcagaaattatgcttaaggggcatttatagctgacaattcacgtaaggctactgttatttctaccagtacttccttacctagggtcgaccgcaattttaaagccaacgaatagttagcttaaccgctaacgctcaatcttactacctactaagagtaaactgcttaggaataagtaggattaaatcgtatctacagcattaatataaaccaatgcaaagactgtcttataatggtagtctgcaagtgtacttccgatatatggatgctataaattactttcaaattatcgaagctttactgtgactacaaaccattcgaagtacggaagtgcagataatttgattcccaatattaatgtcaacaggcgctaggaatagccatctcgtatcatatcactagagctacctaaagtagatatcgctagcccttataaacgatcaaatattctccttagggactgtttcaacaattttttagtagtattatcgttataagttatgctttgaatggccttctagatacaatagtccttcgctagatccagggatctccttaaactgaagtatattagtctaggattagccacaagtgcattaacaattgagagatattcccccctgaccgccaacattaatagatcctcgaaccattaattcctcaggttaatatcaattcggctatggcgtagtagttcccagaccatctctaggtcaccgccataggcagtaatgtagagagcagtatcataggttgcgaccgtgctttcattaacatttagacgtacgccctgctgtactaagagccttactatatcgagataaccatataaaaccgctcgataaatgggtagatctattaaaccccttctattaatctccacgccctctatactcagtaaataagcaattgtcttcacatatccgtgatatatagtaacggaaattggagagtggcctacaacgcagagattcagagtaatcctaggcactgtaagcagctatcgtaaaagtttagtatacaatctcgttacggtatagtgtaaagatatagacggggccttaagtctcccacagcttctaacgaaattaacgtcgatatctttctccgccaagagcctttccgttatcttatcgtataacgagtaagtagacagctaaagtggcgtattgccatctttgtctttacagtttacgttagtaagggggtagcccaggatcaaatcgaccacttctaggcgtctgctttaaacggcaagatagagcggcgtatagcctttccagtcctgaatgtctaagttcagacccttttgcctaagacgccacttaacagtatctatcgacctatataacactaccttatgaagaggtagctcggaatcctgagcatttcgggtacctaaataaacttcacagtcgggcccattaataaacattgttcttatggcgggtctattgattcaatatacctaagaccacgccgactggcccgaatcatcttctaagttagggtcgctgccacttaaaagtagcagttacacgaatcctattcttcctgcaaagactgctaggtaaagcgccgttcgcccatatttatatttaatatccacactggcggcgtggtattctagtacactcttaacgacagaggaactccggtagtggatagcatataacagggcgctatcgcgcacttgattttagatattaatatctaggtctcgacgattgagcagcagttcgcgcatagcagcggaagagtatttcaacgcctatatcaaaggagttttgccttagtaaaatgtattaatgttagcgttatactggagcaaagcatccataaggccaacgttattgtatttaacggccaagtgtaacagattactattctgaaatctaatattgtatttccaggtactaggctgtagtctaaaatcaaggtctttacatgatttggcgagggcgaataatgtactaccatctaaatgcgacacgatccacagcaaaagctcgttaggtaggtctctgatgtttggctgtaatttattagcttatccgtaactttagtaagaaagaattggaactgaccatagtagaacagcagattagaactaggaatcaaataatttgtatataagggtgagctgtagggtataaaagttagacgtggagagatccttatatacttacctcagctaattccgcggttacctagggtatagcccgttaccgctgagaggtacctagcaatcacacagcagcattaaattcttgataacaatgtttaggcgggtgaaagaatccttggactctagctcctgggaacactaaagctattcctagtagttatcgatggccctgggaaccggatatagtctctatatacctacacctcgaatctagtgctataggcgtcgaagcaaataataatctaacacacacttcgaaacttctataggtaacctagaatttaacctagcatttgtcgactttactgcgtcccgccgcagctaacctattcgctaatatatggtcaccgcaacctacagctacaagtgcagctaatttaggcagtagtgatatagaatgatattccttctcgcaggccactgatcggcctataccggcgtatactgcatccaaatgtattcttcgacgtactaactgtttcaaggaaggcgttatatgccagcagccatacagctatataggtaaggaggctacggcgatggcatataaagctgacgagggaacactgcggagattacctaacatcaactcctatctaaagtattttctaccttttaagacaatctcaatgactactataccttagaacccatttactgtctacggaatcccttacggtggtcctatgtcctgttgcagggtaacgaagaaaggccagctgtgcaaaagctctgtcaaattttaagacaccaagatcggccataaaaggttgaccactcttactagagagccgtttgacttatcaactttacagtcaaagctctgtaatattactagagtcttcctctgcgcgagatagtaccgtcaacggcagaccgaccaagttggctagcggtggtataaagcagctatccgcaaccaggcgcgagtgccgcatagctctagagttaccgctccatccattacgtatccgggccagcgttagatatcgtcagtctctaggagtcgccctgtatcaggcaataccgacaggtcaccttacgggctcagataagacctaccggtacggctgtcaaccaaccctaagccagtacaactattcaatccatttgtgacttccacaatactgcggacgaacagtgttctatggcatatttcgccggctcaaccagcgatcctaacatcggtcgctaacatctaggctggcgtccaagacttaacgctcaaggatctcaccctgagcgactatattgacgacatccactgtgtattttgtcttaccgaggatgaagatcttgcaaataagagggtgatcttgcgctgtcagtgcaaggcgctttcctacctagcctgcgcggaagagtggctagaaaaacgaagtacgggttttaaaacgttatgctgtatatggtaagtagggctggttccgttatgcaatacccaaaatgctgattaatacagtcgaaatgaagggcctttagacgccttggttcgcccaatacgagtccaatcgtcgcatgctgagacacatcatatccacacagcaactaaatcatctgctaagagagaacttaccactatcaggaatccatcaccaaataacctgagtcagagccagccgcgtcagcggtcagtgggaccctaagtgggatcagttgagcagagcgtggagaatggcccccgtcgctcggctaggctagtaggggcccatctaccaccaggcccttctacgtctgcaccgccccgccggtcagcacgactaaattccactcgaaggtgatcttagtttacagcgaaggtgtgacgggaatgagaaattagcgaagcgactgtcaatcacgcgcgaagacacgtgaccagacgcaccgcattcggcccagtaacatagagcatagccgtggtatggagttttagagcaagtttagaaatgatgcaaatgaagttctgaatgttcgaactcgcagagcaccaaaactaaaaccatgctaccttttcatctttgcaagtactagatgctaatacacccccaagaactgtgggcagtttcgcttaattttgggatattttttagatcgagaccatattcatacccaacggtggtggccaaagaactgtagacatggatttatctcagtggtgcgtgtcgcgttaagacggagattgttgacagaagaaaacacatctcgggccggcgaacgattctggcaaactcctatgctggttatattgactctgggatttaatatgttgaatctaggaaactcaaaagcattcctaggagctgcctaccccctgggaaatacaatttagctcctggggcttttacaatctccaggaaaatgaagatctacccctgggatcttgactctacgttcctgactgagtacagactggccccgggaacacattggttagatctgggacctgttgcactcgtaggaccctacttctggaccctagagtcaatattttgctttctgaggtcgtgaaacgctctcacaagacaccctcaccagacctccgcacaaaactgagacattcgaccactcccagaaggattagccatagccctaggaaccgcacctaaggttccaggagtaggtaaagctgctaacaggagcatgactttaattcctcgaagtgggagtaaaaggccctagaagctatgttgggcttcctagggtctatttgacccctaggagctgcttatatgctcctagaaactgcactaaagattctaggagcgagagaactcctagggctaagacgtgcgtttccggggccggcagggctgtcaacaggaacttaactggctttataagagtaggaatagagagtgtacaagttacgtacgatttcctggggccatatgattcctaggcggctcacatgttccagggtcaatttctgaagagtttacggcaatcaaggtagatagatatttatacagagcacatcgtcagccatcacctttcgtttacatcaagctatttagaatactgctctaatgttggctaatatcggcggctagtcaggtcaagcgacgaacatgctttaattctaattaggaaatttaacatctaaatgatttccgcaactcagcagtatatctattcctttccaagaccctatccgtcgcacctctaatatctatagactccaccgtcattcttcgaaaatcatcatataattctgcaattgttcttatttgtaaatactcgctgcctccgtcacagccctaccatagtaggctgttagacccgcctctttgactattttatagctcggttcgtgttctctgctagtgacctcgtaagccgcatacggcaaaacgcacaagggatataataatcactagagatccgaaagcggcctggccaacggatccataatacataatcttgtaatatagaatgtggctcctgttaaaaaactcgaaagatatttgaaaaccgtggacgcggctggcaatccagccccctaatgagagaacgattatactcacgacgatttgaatgcacccgtagtaaaaccgagcggcgcagttctcttatagccactttaggtagatcacaaggacaaacccggagatggaaaacagggctaagactagggccgcaatcaccataccatcgacgacgttgtctataagggtgtagaatgtgatgtccaaaatagagtcgctcggtatcacgaggtcggatttagcacagtctcgcaggaggactgcaaagtgtacagtggccgagttgagacgggtaagggctaaccaggtcacggtaagggaagcaatgataagacacgtccgaatcatggtcgcagaagtagtcagagacattgtgtccgcagatttccgaatgtaggaaggtaaggcaggtctcatttaaggaaacagtgacaagaagtaaagaacagcagcggaatgataaagcaggtcaacctcggagcagagtaaatttatatatactatacgctctttacacaaatgctgccttaataagagatagcgcagttgatagtaaggcgtactaggtgcctttttcatgctttgttgcctcagtggcaatcattataggcacagtaagaatgtttcaagtagaagcactatttctatcttaagatcgacggccacggaaagtattcctgatacttggtagtaaagcagctctatgaatcacttcgtgtattcctaggatctactatccggtgaaacggggctactatatcatcattatctccaggacgacggattaggtatagcatatcttaagataagtggtgattctagaaaaatattcgatacagatagagattgccttggtatttttgcgatatatcactttgctatactcgaggaacattttctttactattaattgggaaagtccccacttccataggaagacaaatctctattttctgccatttttattgagcttactgtatttctttgccagctagcttagggtctgcttccaaccatatagcaacccttattgttcgttaaactaaggcagccgattaagaatcgattctgaactgtgaaatctaaccaaataccgctaataagtaggtaactaacatagatcaagtaggaattctctgtatacacatgctgttggtattaagtaatcatattcaacgttaatataaacgttgatctgaccccagtcaccacccgtataccgacaaaggtggttatccgagaatactcggtaaatatatcagtacgatactaccaagctatcgtagacgaggccaaaggccctagcgctcctagaagcacaaataagactccgccagtcgcctattttactgattttactatggctttttgtgcagctgaatcataacgcaataacaagtccctagatataggaaatgtatctcccttccgtatttttctatttataaccaacttctggaggcagtgataggtcggcgcccgtttacctgggcactaattagagggcgagcggggtaaaccaccgaggcaaaaccctataggtcctataggtagagaactacggagtatagcgaagtacaaaatactaactctagatacattcaagctagtagaaaatattcctacttatctatattagtaagttagtgatttaatatagcacctgcgaccccgagagctttaaggcagagaccacgaagcaggccctagagcgcctcgtaggcgcagctggacttaacgcaatttgagcattccgagctccctatatatatagaagtctggtagctttcaggctttcagcgccacgttttcatttattactctgaggtggattacgtatataggttagctaagtggcagatccaggaaataaaacacttacctaacaatagatatagatgcagccccggcctttagcgcattttgtgtcacttgtaagagtatcgtttactctacatcttgattactatttaaacctttatagatcctaggagatagtcacaaattataaataatagagacaaatttaaaggtatggcttttaataggtctcaattagtttaggcaccccgggccctttattttctactactaactagatcttttaagtgactagatatacctagagggctataaattcctcccctacccctttttattatataataatttgtagaccacttaatagtcgagtaggccttgcgctcaaggcagcctaagaatttcttttttgtaagtttactttttaaaacgactgcgagcttcttattagttcttaaccaagatcgtttgggttctcctttatattatctcaagctctgtctatcgaagcccgattgccgcgatggcgataaagcctacccctggctatttagatatcggcctcgagtttgatcgcttaaaggacgttaaggtaatatctctcaatacaaaacttgtggcttttatcgaaaaagctcattcatcgcttcagtcataaggaatttttaagcaataggattactataagagatctctcctttattatactactatagggaactgtataaacctccttctatatcttctgcaaagtaagctagatgttgattcttatgactagtaggggcagacagcactctcctaggctaccgagtacggcttattagctattatagaaaccttactaaagtaaggagcaaatatcaatttatccgattataagggcggcacaccgttagtatagctgatatataccggtaaccctaaaatggtagatatagcggtaactaaggcttacctaagagagaggggtataaaagaagtcaaattaagaggtatcaagtcggcctaggtttaggttttaagttattctcatttactccgatatattcgcccttgtatctgaggcgcccgatgatatggcgaaagcccattctatactataccaatacatatattagataaatgttataactaaggtagctggaaagcactgcggcgagaggttagactatccgatttcacactattgttatctttcttttatgttaatttagacttattaaagtggagacaaaaacaagcaagtttatttgagtataatagatatacagatatatattttattagtaaaaactctagtcttacctagcgatatagagctatagggtaagggtatacgtactcgtttccactttagcccgtagcggggctggtacattcgaccccggactgtctactagaaggctttgagttcatagctctttatactagctatatattgaccgttttaagtaatataaggtcttagaacctttgtttaggatagcaaaggccctgagcgatatttaggagtaggataagacgatatattgattatctattctattaaggctataaaagcaagctagcttattatgttttaaatatgatatcataatgtcctggtgctagctctgtgtactagggactataccacagctctctgacgtagggtaatatatagctttagggctaatctaattcttcgagctgaactataatagtagagattctatagattctctattatacttagcattagtcaagtaaataccatacttttctaatgtatttttaacgagttactgtatagggatagtaaacacaactatgccttaattgatattttaaccacggtagaggtctactgtttccgaaaaacagatatagctttcttactcacaaacacgtatgtctatagtatcgctagtatctttaacaaataggttagagtgatatcactttaatcgatatacaatgatctttaaagtaaagtaacgcttaatgtaaataaactaaccctaaagagccttatgccttatccttaacaagctcgatggggttaattagttagcctaaggtaggtactattcttttatatatcagataaatcccggtgacgttctattgcatttcatataggaaagggttcttcttgagttagggggtagtgtgcctttatgggcactgcagtacaatcttgccaattcattcaaaaagtaccgcctactcctatcttatcatttaatcggtgcttagtattcttcatcttcttcatgctataatagaatagaatagaagtcgctctccgtttgcttactttgtcttattgtaatgtattcccgttcaatggatctaagaggactataataaatatatgtactagatcaattccttattaataaataggcaaacctttagagagaatacagagcagtctacatatgattataaacaagagatactccatttacttaatacagaagtcgagaagctaaagttctactataataaacctaagggaaaaacttagataatcttccgtttgatcgaagcctatgttatacctctcctcgttatactattacttctcaggtaattcattgtagctactcgattcgggcccctacccgcttataccagctataacaagggtattgtatatatattgtctatagaattgatctccactctattatccagcaaaagctttactgtacgtaatatactatattgtacagcctaagagagcggcgtcttcctattctaatctaggtcatcctttactgtcctatcttataggagataaagaaggagcttagcacagtcacctattgcagtatagtgaatgagagaccttttaaaaggtcctcgttggttgtatatcccttggtatttaagcgttgcctatatattgtgaagaaacgctataacgtctttatcaaagtatatctctctaatgccttttaggtattaaaattcactattaatgatagtcatagagcgaggaggaattaccatagtgattgtaggtaccccgggatggttacaaaaaagctatataaagagataccagaggcttgtttggttattaaggaagcggaaagataggaatttctatatatatcgcgatcgtccgctttatatagcaagtgttcaaactgtacactacttatatacaatagaacgggcctatatagaatagtcgattgaataggtgatggatattatcagtttatatggttatttatttgcgtccgctaagtagggttttttatattcaacgatagatcaagttactaagggttgttggcaacccgaattcaaatttagggtagttaaaaaaggaggaggataaatagaaaaccaataaaagtggcctactaagcccgatgaataacatagctggtccgatttcgaagtttcggccatagtctagagtctatatatcagtgtccgccttaacgcaggtaaaagccccggacaattcttgctgcactggacatcagtggtgcctaatagtcgggtcttctattattatatacttttagaccgtatataagtagtagatctttgtccggggtatgtcaaattatgaccagtggcgcgctgaggagttaaggcacaattcgttgaatttttctagtatagcttaggcctacagaatataatgtatatttctgatagccagttagtttcgaaggctaaaaaataataagaaggtataatggagtccaataagattcaattggaacaaattgcgatcaatatactcatatgccttctataacgatacgagacggctacctgcgaactgatatcgcctataccagatataaaccaacatccaatacagagcgtttatagtctcagtgtggaaaaccaggagaacttccaacgctaatatcaaagcgagttttcgcgaagccatgatacctattatcccgcaaatatactcgcactccccatcgagttgctgtatgatgccctagattatctatccacggaggatttggtctcgttcgcattttgtcgataggacctgtttcaagctctgattagcttccttgaacgcaaagcaaggccatctctacaagatcttggcctcttagtcacactgttcgaggaacagtggctaaagaaatagcttcaaattatcgtcccgatctgcgctagatccgaacagccgatattgagagatcttgagacacttgtgaagttattcgaagatagtcattggctgaaagagcagctccgagatatcattatagtatcagctagacgtgaccaaccaaccgtgcacagttatgtcgagcttggatttgaagagctgacttgccggcatttgcgaaaaaggccgcatacactatttgatacgaacattctccacatgacagctttacacggaacggaaatgatgtatttataaagataatttttcttcgcgtagatagcaatatcactaggcacggcctcgtccacacaggaatcacttttgaatttagaaagaacataattgaacgcattagaaggaggccgagggagagctctccatcccagtagagcacaccactgcagctcacaagctattaatgtggctgtcaatcaaaaggctgatacaccctgaaagatatgatgaggactatgtcatgcggttggaagaagagcgcggtctcatcagtatatacggccaaggcgagatctcatacactgccgataacagtcaattaccaatggatagcgcggtcttatcagcatatacggccaaggcgagatctcatacactgccgataacagtcaattaacaatggattgcgactctaaaggtactcgacccggtgtgaacggtgtaggacagcacgtcaatattgatatcgacaaatttggaaacttggatctggatgctacgactgctaggcgctactacaatagctactttaagcacatgttcaagctccacccattccttatagaaagtgaacttaggattaaggtcgatagctttatctaaagctattgttaagttaataattcaccactaagctctgtttccagctacgctcgaccggctcgtgatggtccgcctctagccaaaaagaggcagttaaatgaaaacctgagtatacgcggcgagttattggagcctatctctaacccactacggccatgagtcggtaaaaacattgatactgccttaatcctgctgtgcctggcccttggggccatttgcgaagctcctgcccctctccctaggcccgttatggataagaagattgactaccttaactagtatatccctgctccgctggcactattcaattctccgctgcctgcaattacgatatatattacggatgctaatggtgtgcttccccctgtaaactctggcttagcggccgtatagacgttgctttcgaatcctctctatagtgtaccagcctagcctattggctaagctttcctaaacagtttatctaacaatcatatagaaggcttgttaaggagagatgttataaatacacgggataaataagggaatataaggaactaccaggctatccctagattgactctctatagatatacaaccgcaatactgggctatctgtagggtggaaatgagctagaatatattcagtgcggcttgcttgctggactttatataggctagttagcccaccctttctagagccacagttagatttcttaggtattgagggcttactagattcttgtgagaactaagcggtatgggtaacttaataagggagctacgaaggacttgtacgattttacgtactagacctgtctgtaattggagagtgaccttctcatagagctcgatattctagcgagtggtatctcctatttagaaggttggatacctattccgaaaggaaaatggacgatatttctaccaaataatcttactataccagagacgataataatactgttttattctacctaaatctatctatacaaaatcttgaatcgagtacatatagacttatataaggttgaaaagtaagactagatataatggtcgtttaccgtttaagaagctcttagcctgaacctcgaccgctggcgtgaaagtctacccgacagcatataataggacgaaagtgatccgccggtaaacgaaatcaacgctgcccgtatatatactaagtattacagtgcccggtatattatccaccgaccccttctctattatatactacactacggctatataggtactcgcgccggtccgatcagctagaattcaatggaattacctgtattctaataattgcccccctctatactatatagctccgcttacactccgagtatatcgagtgatataggctctacgctggccacaatctctactaactggcagctacctgaggtccgattatataagctgccgaagaagctgaaatctgtataccatatctgtattagttcggctattaagagcacagaggcatttgacagagtaggaggatatcggttagtcgttaccaatatctttaggactgcctatacataagggatcctctggccctagtctcaaaaatcacgaatatagaggaaagacttacatgttttctttataggcaattcagtaatatactcgtcctatctgtaagttttatattaggtctaaaggagcttatcgagctagagcaacttaagcgcctcctcgtccgtaccataggctttcttatttaaagcgaaaacatatctctaacctttcgcgccgatactcgcattctcactgagatatacgagaagatctttaataaacctcctaacttgaagcaggccactagaatgagagtcccttgattgtatatctaacgttaatagtattctctttgtctagagtaccttctgctaataagcctatctaaaatggctaccttttatggctgccttttatagatataactaactcgaaagtaaagtagggagccctaggctagtcgatttaagggctcatatacctaggtaatattttcttccgcaactgtatactaagagaccgaaaaatatatacttattgaaattcgtcgtatattcgactgcctaagaactctacagcactctgtggtactatggtcgtgctaaaccccagctagctcttaggactaaaaacggaagattaatttaaattggtattactataaatagtggtaacggatatcaagatcctcctgtggtaagaaaagactgaactgaaataaaaacaaggaaatattcaagtaatagcgatcgtatctttagtcattatttaggataaagagattagattatatttctatgagagatagaaaaacggtggaagaggaggaatagataggttgattaattatctcaaatagcggcctgctatatgtataaagccgatttagattggctggggaacggagggcatggccctcacttgtccgatagggtctgttataccagagaccatactgcgcgggactagaggccttagtcgctaattaaatatagggctgtaactaataacagctaaccgatctatctatcctctaatcatgtaaagaatcttattacccgcgaagagcactaaccgacttaggggcacctagctaggagcccttaatctagttagtctccgatagccataggacttactagactagcagcactcaagtaagtactactgatagatttgattattctagaaactgttgtatgcgagagtataacattaccggtaataacataagtattgggataagatttcggtatataagtacttatatagtttcctagcaatatgcacgctgtgttatttgctataaacagtctagatttttctatataaatcgcgatcctaaattaaaaccagaagtgctaaatcgcgataataactattaaaatggactatagtatctattattatcttaagtggagaccctcgataatatacaaaatcgaatatacagctgaagccattgataagtcatattcgaaagaagactctggtatagattaggaagtaagccgctttattagaattagctccgaaatgtctatatagacaactaagttgatttataattaactgggctccgtgttatatatataacctcatcttttcctctagaataaaatacaattaatatacctctgaactataatatattgtaagacaccactactagtctagaaagcggtctaaaatacggtggcttcattgactatctaatcaagagttataagaccgtcggatttattctcctggaattaagtcgcaagagtataaaggtataattggatacgaaaactactaatatcggtacaaaaagaagagaactctgtagaagaattcatacttaaaggtacgtttaacctcccgctcattagacttaatacctagaaaataaatcctagatacgctattacggcttctagagatacctagcaacctagctaaagaaaccattcttacgaattttgttggcctaagactggtcagaaaggtatggctcattagatttatcctctgttatgttctcgtcgcccgatgagttagtagtattctccttttgccgacgatctaattggcttcgttgcttcgcggatacgataaagcgctccttaaagaccgaccgcattgcaattctcgtgccctgtttgaaggtgcctagatacgagataatgaatagtatagtgttataaaccttagtaggatctttttttttatcgctaaattcaccatatattattagaaatagaagtcgaaatactgcgtcctgtactcgagatttatcgccccttacagcttgataacgcttatacctgagtttataatcggttttataggcccttaaatcggcaaaaatattatcaattaactgcctagcaagtatatcaaccccgaggaaatcatatatttcacagagagtgtaatattaagggatatcgccttataaagagcgaaaacattaccgatagcctgattctaagcccctgagagtaatattaaataaagtaatattactgtaaataaattcagtttttcgcagctaggaaagacgttaaaagctgacaaaggctgataaatatggtatcgtcgagatattaatattatagaaagtatccctaatttcgagtattattttgtgagaatttgatttaaccgctttagtcgaacccattttgtcgccgagtttcaaataaagatcattgggtaatatcctactcccttctctctttaaaactataaggctatcacttcgactattatattttacgatagcattcctactattctctcttaccactctaatgattcccttaaccaatacaactaatctctaaaggttattagtatagtttcgttcctattcagtaatcttataagtgatgtctttgacctccggtagtctaaatataccactattgtggtaggcacggataaggttaggtgtttgtgatacctatagctatagaagaacttcttagatgttaaacggcttatgggacacttgtgttttgatcttaagggttgaattaattaggatagattttccttttttctaaaccactaatttagacttggtaataagacgagagtaagtttcgggttgtgaaagagacagattttccatcatattcagaaaattcttattttccgaacctataccttaaggttaaagatttgcagcttctttaatataagcgtcagtcttgtagtgtactataaattttaaatcgcctaagttataggagataatccgatgatatctagtgctaccggatacttgggtatttataaacgctttctcaaacttgtgaccgtagtctctgaagtagtgtggcccgataaatgtatatatttcggtttctgcctagtaaaatattgctatattacttatagtcttaattttaatggtaaaaggctccagtccatttctagagagatttggattaatgaacgacagaagtttgcggatattatttcgattagttatcaagtcaacttaatatatgttatataaaggcttttcagtgtatagtaagcgaaaaagtggtttaagcggacttttaggatagcaaaacgcgttttgagtaatataaatgagcctaaagtctttagccacttttttagaggtttggggtagagaccatagaggcgggcagctagggatagcaatagtagggctggacgattcgatctaattataagaagataaatgctctatattcgtgatagatagctggatcttcttaatatctattaactctaggcgaggtatatctacgatctaaatagaacctattgttactttacttggttagtgatattatgatagctaaggtaaatgagatttagattaagtcccttgagatatttaatcagtataagtcctatatattaccctgtatgggtttagataatatatacttatataatctagccttaccttatatatactctttgtctagtttgtatagaacctttagatatccctgtaggactcttatttaccgaataggagattagaaaaggaagagataggtaaaaggaccctataggtaatactaataatgatactaaatgtaaagtgtgaagtgataatttagctacctataggattatctatatagaccgtactctagactatcatttgatactattaaagccataggttaggtagaatcctagtaattgtgcgcttactacaactagtagccttacctgtctaataggtactaagtttaccactctataatacctcagtgctaatagaaaccatatatgtcctagatataatctattagatgtaatagtattacgttagttcgcttctcttagaggcggtaacacagtgtaaaattataggaagatattgataggataacaactgctaggagtctaggattatcggggttgttaaagtctatctctagcctacttagggttaaggggcgcagatacttctgcgaatacctagaacccctttagaggtaacaaccagctcatactatataagacgagaaagggaaacgaagtcatgtaataaattgtcaagttactgcatgtaaggcggccctcccgcgtgatttatatactgtaggtttaacttaagttccgccgctactacaaataaagtactatagaccacttaaaaaaggtgcttattcttattaagcctctctatctagaggctctaactcttaactatcgaaattaccatcgggaaaattctaataggtaaaaaacctgattgtctagcaagtactatgaaatgttaaacaagtacctaggagatctattttattagaagagaatcaagctaggtaaccctaaactctaacgaccatacgaagtatataaaatagatgtgacctagtagtgtttagcctataaggaaggtgctcttggggtatagtatttggaattaaagttgggctgagcaggacgataaaccgaataccgctcttaagttcgggtcaattatgtgatttaaggtatataaaatgacctaaatgttacagatgatcggttattttaggagtaactatattatgagctttagtacctagcgggaaattgtagcctagcttatccttacctatcttagtcttagatacgtcctgtatcctttatcgtgactagcagtacgcctagtgtctagccatgcctatgtctgagataggctataatttgatttcatatatgtactaaagctcagatccctttccgattatgaatgataggctgtttcgtagcgctagcctactctatatttattctaatactactcggatcacctcagcgcttgtaatatgatactaggaaaatatatacgttaattagccgtagggatatatgggcctttacactcgggtttagcgactagaaggatatatggacagctataccgtggactatatacctttgagtatagattttggtataataatatatattttagcatatgatatctttgaatacattcaattctataaatctactatatattatatctttcgagggccaaaatcgttagtgaaatcaataggtatgaagtagagagatgtaatatcggatgatactgattaaaaagtacttttagccgtctccttcgatagcccttatcgtaataacagcaagttctggtcaagccggctcctataggaatgcaaagtgtaaccactggaatgatatacacaataggtatatatataaagcagcgggttatcggaaataatggaaaatttgctaaacgggcgaccacagaatctctgggaaataggctatttgctcgaaatgcgaggcttaccccgctggtaggcctaacggctttgaagagtggattaatctgacgatctaaatactttagtttatacggctaagctattaactgataaacgattgataaccatcctcttgaccgctatctaaattgatattatcaccgttgtcgtcggagcttttaatatcgatctaggaataccgatataaaggtttttcatttactggataccctgtagacctaagctaactaaaaattccgcgagttgcagcctctgaagctacctgggaaaataagtttgagttattttgtatcgggtagtagttttccttatatttctttgttaggaattccctacgaaactctattagagatatgccggagtctttgagcgtttctccatttgctagattccagttctaggttttgtactttaaacagtgatagcggtaagcggtatattgctgtactgtaatttcagtattaagaagtcgagtttctctaaacagtttctatggatgaatggggggtctagtatatccattataagctgtaataaatagtaaacgatactcgtcttccctgtagattatttaaccgttattagtaccaggttctacggttataaaagattggtacattcttgtctaagccgctacattgaagtccgtggctgtaagcccgatccggatatttcgtattatagggtttactagtcctaccacaattgcaccgagctaaaggctagctaatctgggctgccgatatataaggaccttggcgagtataagaggcttcttgccctagactaaagggtttgttattacaaagataggattaagccaggcgctaataaggttgcatttaatctctctgttaaagaaggtactagaaagtaaagatcgcataccccacgcattataactcagtatcatataatgggaaagatattcagagtattcctttactagatttgaggatttttgtgatagagacgatagtctatagtataaggctgatttcgggataggaagcgaaatggaatctccgctaagtaataggatataaagcgtagtaactagggccacggaacactgcctatagagtcggtaacaggagcaaaacctggctagatattctaaagtagtactagataacggtagtcctaccttagagattagacaacctcctactatccctatattaactttattggagagaataatagactaaggtgagtagtatattttttttttataatctattattatttcctagccgccgccagagtgtaatatagccccctactaagctgcttcagcagctttaatatcgtgtctaatatcaatttcgattatatcgcggtatctggtacctattataagctgaccggccttatacgtgaatttactactgtattagtatcctaaagtgtattctagtgattctgcctatcgtgtagaaaggatataagcccacgtaaggaataaaacgctaatataatttccctcgttatggttcgagataccattaacaccaggccattcttataggggggtagattttaatatctctactatcaatagattgggaatagccagcagaatatctaaagccattgttttcggttcaaggcaatattgcccatataaagtagtctagattgattgtctagtgattagaagactaaactgtcccctgctcgattccctttcaatataagtaaagggtagttcagtgtctttgggcaccagaccatatctaaggaaagacggtattcttttgagaagcgattttagatcgatggaagaaggtgggagataaggggttttatgagtatttgttaggtaggacgaccatttatcatagctttcggaaaggatacgatcgaaattttctttacttggacgaacggcattatctatatcagacttagactatatagttgagtctaaggcactgccgctataaatctagcggagtgctagactgactagttcgaataaaaaaaaaaatatctaggggcttctcttataaacgccagataattaataggtaaaatgacgtataaagctaatgatttagatgtatctaaggaataaaaatagtaatattagtaagttctgggggaagggaagttgggattgtacttaaattaacgagatggtagttggtcgaacaccctggtaatatatgtctattattactaagcattctttgtttttccgttccgaaatatcctttatatatacaatcgggaaaaaagttatgtatacgctgtaataagctaatcctactgtcgtaagaggctgctaaaaaggttatatataataacaaaacctagggtttaataactgcgtttccttatcccaattatagctagctctatagggggctaattaggtctacgttgtataataagggtattagatagaaatcaaggtatagtgagtatattggtaaaattcacaatggtaagattctctaactaaggcccgaatttgataaactagtccgatataattaataagtaaaacgcttagttaaaaaagttatatatttcagcggtaaaaagaccgggtaatcaatgttacgccttatttcttaatactaggatatagtcctaggagctagattagagttcctaagggatacctacctcctagaattgctattaaggtttctagggtcaatgtattaattactagagttaaattaataagtaagagaattcgtcgagattctgctagcccccgagttgtattttctgctaataaggtccgtctagtcgattgtactaatctagtgtaccgcctctatatatattcctaaggcaaaaaggctactatctacactgcaggtatgtgaatcttagtctgacctattctggagttccactgatcctgaagtcgatacaattttaatagaattgaggacattcaaccataacgtataagcgtaaggactatagctctttaccatctcttcgtctgtagctttggctacccgactatctaagtcatatattatattaccggtctataagctaaatatatgacagtggaaccattaatattgtaccagagtggccctgaggatacagtacctatattagtattctgtataaagctatagccgatatactagaccttatcctatcgctttataccatatagcacaccctaggtaaagtatataacttaaatgaaagggctaataatagggtgcgaatatccgattgcgaaattcgctatatagaagcttgaaacgtctattcttcccgttaaggtaagtgatttatcgtgccttctgctatactatatccagttattcgtgcaatattttgcgctctataacatgaataccattgctgatatttatactattgtagataggagcagcctatcgctatctgtgaaatatacttataaggagtccttttatcctaggtccgagataagacctaggttactataacgcgtgctctatcgtgtcttcccctttcgaccacactgcctttataccatgatagtggggtgggatattcgccatctgtatcgtgaggtcttatcctattacaattgtacaatttcttattataggtaggttcgtcgcgcgcctttagggcttagaagttacccggtatatctggcgcggcttcttcgaagtaatagccggagagtacaacgaactagatataacattatattaatatggtataaatggtgactgtattactgaagacgattgtaagtgatctttatcggtaagatatgactataaagctaattaattgactcgttctaagtaaaaattctgtgatctttataaactagtaagttataaccactcgtcctagtagtttaagccttactaaatcggattgtataatagggggtactgtcatgttcctattactcaagtcgaagcgcgcaagtgtattgtctgctcgggctccctaataccgatgcgatcctatactctatcaccccgaaatgaccattggtagtatcgataataagctaatataaagttctgatcgcctttaccttcgcccttctctctcaatcgactctgtaccttacttaggttatatactgatgcgtctacgctatatataccctaaattccaatggcttataccactgtatatcttattcgaatattgtgaacgaatagcccttatgaattagactagtggtgtctaatgggtggccctacgttattctcggatggtatctggcgtattttaaagccgaatatttcctacaggcgctaggaaataccgatgtttcgtcttatttaatggcaagggagccctaccttcgccgttagctatattgttagtccaaatccgtgtgcaaggggaaggtaaggcaaaactcccttcgtttctgacctataggctaatttcggtactagctataaaccgagaagataaggccgtttataccgaggtacagccgagctaactaaagagccaaaaataccgtccgatactgtcctatctgatcctactccgcattacttaggtgttcgagatatacgaacgagcggaaacggaccaatgggaaatatacgaagctattaagtcggtattagaaatgtctcctttagaacagatatttagtagatttggatcctaagtacccattcctctataaaaccccaatagatatctatagagtcgtatacgccttagatatcactgaaactgtaggtcattaagctggccgtatatctctatctattgatattgttttctaacctattgcgcgtaagcagctcctaccatagactcgtcggattctgtataccatacgtcggctatcctttcagtattaagtatatatttgttaaacttaccacgccctggacgacatttggtatattactgttcaagtatatcctttataaaggtgagtttcagtctgtaataataccacctagagctatcctactgcgttctatcggcagcagagtaagcttaattgtataaacccgggtactatgccccggaaagtaacgaccggcggttcggacgtagtattggatattgatatatagggtacgatatgaattatagttactaacggggggattacttacaatgttgcggtaactcccgaatataggagccgatcggatattcttggttggttttctttattgtgaatccactttcacccttgggatggttctaggatatagctatcctatagtagagtaagcttaagtgacttacaatcgccgactaaagcgatgacttcgaataagaaggcagagtctattatatcacgatgtttaattaagctaataaatggtatttcgagcggttccttataaatacttctatacctagtaggtctaatcttaagcgtatgtattgcctatatatagttgaactaacggagggcagtctagggtttacattcgaccagctcaattgaagtaggggctgtatataaattcaccgagtgattagaatggtactagagatagcttatgagatagaatcaataaattgatatatctattatatggatgagatggtaagaaaacctccgtgttatatctagggatattgatcgacctcgactcagcctacgaggcctatggattcgtaataacttacttctacctgtctataggtgggcatggcgttggttggcctatggccgcttattaataagcccttaatatatgtatttactttacaatgttttagctacgtataggtcccacaatgctatgtatttagattagttagatagaagtatatataacagaagagatggattgaactaagcttattaaagcggtggactgttgagtctgtgatgctagtggcgtacggttggataagagggctactagtaagatctgacctgaatgaccctcaagggtctgtatttttgagctccaggtttgctgaaacggtggaaactaatatatctaataagaattcttattttaaaattgtctgcgtattaccccccttctttagtgtaaagttaaaccctaagcagtgagtaaagttgaagggacgtattatcggcttttaggtctaagcgccttctgtcaatcagagtctaagtaaatacagaatagcagtcgcatttcttctattttagtcatattcgagggatattgaccctattgcgattggcagtatacggaattgatagcgttgtaaaatgtgcgatgtcattttcattagacccgaactgtggagccacgctttacttactttaagattaaaatattttatattagaagggataagatatttagctcaaccttttctattaaaacgagtgaaatatatacgctccaccggcctctaacacatatatcgcttatcggctagtatttaattagactgattgtagattaagtttcaaattccttttatccctactcagggtacctaagcggggacttgacagaagattgaactttagtctttcctttcttattcttcttcttgctacttatgcttaaaatagaggttgtggatagcggtatcggctccacagtatactgctcgatggtatactcgggttgtggagtcagttctgataacgtagggctgtacgataggactacactttctgaatcatagctactactaacagcttccacaagtagttcgattgagctgtaagagccctcggacagtgcttcctggtcctattaagccctagacccaggcctatcgtttgtatctaatggtccgattagtgtatgtgtaacctaatgtgagtttatttcccttaccaagtcctcttatactaataaaacgccggtatatattagagccctttgtcagaatccacaattttctatttaactgctcccttaggctttggctttcttccgattcacctacaatcttagagaccaagtcttcaggtatcttaaacgtagtaataggtataaagagtgctggcagagcggtaaggagttttatttcgatcacttcagtggcgacgttattaataaaacgtttcagtgtaacctatactcagtagtatcgagattaatgggatatttagaacagtatagaggtcacgcgtcttaccttatagtatacaagcatgcagtccagtgcctcctctaaagtaaatcgagtcatatctagtgtgcttttctaaacaagggagttgtaaaggccccagagattgatagtatatcccacagggtgggaggtcgaaagtgtattagccccaaagtatgattgtagagccttacggaacgcttcgttttggcgatcagctcgagtgtcttgcagggttttagtaaagtagtgattgtaagtaattggatagcctcgttaatgcgatataaggaactctctactccctttttctagggtatactgtaagcttcctagagctggtaaaactatcttattaaaaatggttttcgaggtagccccgtctgccatatagcagactgtatgttaaagaaaatcccttatagctgcccaagccctgtcaatatagctttgcgtgatatctccctatagggcgcactattcttaaaacaaatctttaacgattataggattatatattctaggcaactctcgacctcttgtcttcttaagaagtatttcaatatactaaacatattcgtcttgtgtgattgacatttgatatttagataccaatcgtctatcttcgtctataataatatatcgtgaatagccgcgtagggagatcttcttcgtgaattgcttatttaagttctgaatgactgctcggatttacttttggtagccagtgtctgtttttacatctctaaagaaaggctcgctgtatatgccttctacggctactttgataagagactggaaagcttgacctatatgtaaaagatacgacctttacttaaacactgttgcctaagggtcgccgagtttctgcagctgtaattggcaagacttgacttttatattgatctcgttaataaggctagggagttcgcttacgatctagccaagaagtagaccgctcagacgcgttctcagagagtctacgcctacaagtgatagcggaagctctttctaaattccttaggagaaaaactcgtattcccgaacgttttagtcaaacagacttgacttacctttctccgagtctatattcttcaaaatataccatcctagacagaactccacctcttgattcttagtaagcgatataaacgaagctttactctcagatcctagcactaatatattaggcttagagataacgcctagagtcctgattctagatagatcagtatcccgtgctaaatgtagaacgatctggtttataaagttattctttacagagataatagcaaggatgacacttcggggctctcgtatatacgattggactatatcttaaaccaactgaatatcggctgccgactgctgctgtgtttctaagtagatcagtcccggaagattaataattgtaagatgtggccgatctaggccagagaccttaactcgcagaaggttatttgaaaacgcttttctgtaggttgagattcctattgctgcctttgcgttctctatcaactctgtaagaccattgaaatcattgagtgattcacaaaagctgctaagcgaatgctgctctgtatcgctgcgggattgataggggataatagaaacccggactcctacttacgaattcttctgtagaactaattcggttagaaatctagtgcagagactacttttcactagaaaagagataccggagatagctttaagaacggagctttttccagaagattggtcaccgcagacgatgatctgtggaagggagacatagtggctgataccttaggatcggagggtatcgatggaatctaaaagatccagctgctcttaagtgtataagccttcaagcgcctctgtcttaaattgcgttaaggttatggtgatactgagaattggagacacggatggagtggttaatattgttagaataagtagcttaggttttaataaatattggggcagcctactagatgtgtatatttatattccgctagactgcccgttcctttctaaatatattacctcctcgataccagagtatatagtagggggtattctttctataggctgtcttgattgcgttagacctagagtgtagtctccttactgtagaactagggaggaatgtttgctatttaaaaattcaaggtcgttttgtttgatatgaaactgcattcgcttatagttactgactggctattagagatcttccgatataagctttgcctttttcggtcttttaaatagagttccgttttaatttaattgggaaatagatcggcggatcgaccaccccctatgcaccgaaaaaaaagtacgcatattatagattcgtttgctaattctaattacactctgcctattgtaagggattctagggctagtaagagcgttttctaagattaaggtatttatctttctaaaagtgggtattatatctgctttaaggttataatgaccaagtaggttgatatcgaggcaggtctttcatttataggcttttaacgttactttagaatagttaattgggagatatttctatctccccttatacgaatacttcatcttcgatagttagaactagagtcaactactgtattctaattattactataaatctacactctccttctactgtctacgagctttagtgaatcttatatctgaatagcaaaaatattcctaatttttttgactctttatacgcgataaatgcttccggctaagaaataaaagcctatagctatatggtctatatacaaaaatctttataataaggtgttaagtttgctggttaaaccagatctttactatgagttctatgagaatgataataatatgagtttaactaatatacgtgatataaatgttatgggccgctttatatatcataatcgagcttgtagagctcgtggatggtctagtaatatgatcgctattactattcatctatttccggggcagaaatataatacaagggtataccactaacgctgtaaattttgctactagctgagccgaccggtattagaccagtcatatactgagaggattgtctactagattaggcaatggaacggaatccatatggagaggcctctaatatcctatgatagcaaaggtccctataactggcagctttgtgagggatataaagctggatactgctcttaagcagatgaggattaggtagtataactagatcggtttattagttgcaagttataagagaagagctatatattaacacttttttagattgatactatagcgacttggagttggagtatggtcgaccgacgaatatatgaattaaaaaattcctttatattatggttatatcaacgcggagtcatattagaggtttaaatggaagggtaaatcgtattgtatctgttacttgtaaaactcgtttatagacggcggacttttatcgtaaaatgaattcaaaatgttattaaaatattcttattccttaatcgactattaatagacctagtatatttaatatcgatccagctcagctgaaattaacaatcttttacccatttggacccagaaacagtttgggaaactagggataacaatctttttccttaatatacatatggtataactcatactccttggtttatgaaaaccttaaattgcagttcagcttctctttattatactatcactctatgtttatatatggaatccttagagctaagtaacagttctagattgggagatcctttagggattgtcactatatcttcaatttcgacttcttacaaccgtagtctatgagctcgagtttgatggccatatattagctcttctaccactggatttgcctttatataaagatcgcgcaatggcttaccctgagaggcctctaggagttcgactaacaatttaaagtccgcctcctttaagtcgtagatcctttaaaatgtcagttacctataggtataatcccgcagggtatatatatattatctgaaactcctttgtccagctctcctattaataagcatggctgtaagaggtatattatactctgcctaaaattgtttactagggtttggtatcgttatccgatgattcgtaatcgcgttattgccctacgtcttcgtttgtacttaggattatctgtcgataattgtggaaagacctcccttatcattctctccgtaattatagtattgttattgtgatttaggttgccctttttttgagccttaggcgggaaggattcgactgtataaaaaaccgagtttatagaggtacggctttgaagccctctatagtctcgaaaaagttctattaggtggtagcgtttgagaagaacattgagggcaaactttctatcgagacgatttataatttcgtatcggtccttcttggatgtctgtcgcgatactatttctcctgaggataagttggagcttagtagggcattttttagatagataaaagcactagcattagtaatataaatgagaatggttcctaatgggtccgaagagcggagtgtggttagaagcctttgcttgatatatctttggaaatatgtttcatacggtaaagggtgcccttttgcttcgcatttctggctttccctctctagaaagccactatacttgatttttggacttatcgctgtatacttctctggtctattactcagttgggtactgctgtgctgttttctagagacttggctgatatatagctctttcaaaacttaaacaatcgctttactttggttgctaggctctaggcctgcctaacagtgttccttaatacgtgaaggtagatcttataacgagaggtaagcggtcataggaactatcggtaaggaataattataagagctataaaggggatattctaaatctagagggataggtacattcgtcgcttataggacctcgccctctggagaacagggtcgagaatgattcacagaatgtatatctaaatcatttaaagcctaggtttccgggttatcgctaaaggttagcgatagaggtatagtgatgtccggtatagagcttagaactatctgctctgtaccgacttaaacgctattaatggccctgttattaggagatggaatagatggaagtggagttttatgtagtggatttgattagattagtgagatgtcgctagtacttggaagatatctaggcctttagaagtcttcttctataggttgagcggtagtaatctcgtaagcttctaaaagcatttttcccttgccttcccgaagaaacctgtcctagaattaatgatactttagataaagggcctaagctaacttacctaagccgcagtatactatctaacactagatctaaactactggtccctatcccaattactgctataagggcgctaacggccgaagcgagactattcttagccctatgtctactcgtgctgtatttaattaacttattaatgccgttcccttgcgcaatataggctcgactcttaacagtattatagtcggcccgtaccgctgatatcaatcctgtattatattagaaggctttcttcttctctgattctttaatataccccttgttttggtagacttagacgccttatgaccaattttcgcaatcgaagtattaattaaagatattccgatttgtgtaagtgttttgaagctatctaggatatttggattaatactagcggctgttaaagcttagtgtataagcttattaggcagtgcctaaatgccgaaaagagctcagacttacttagccttagtaacgtttattgtggtatttattgtgctaatttacttgtgaagagtataggaagaataactaccttcctccgctataattagtgtgatttatactcgccaatatatatataccgacttttcgaaacttgtatagttgaggaagagaatcaaggtatatatatattcaatataagtagctaataggaatatagctctataatagtagcctgtatagagtaagctttcatcttcctgctaagccattagcttagtaggtcaaatacgtggtataatatataagaatagtattattatagaaatcatgtgtaagaaaaactgtaacagagaatttgctaatgttttaactctatcctctatattgctataagcgatatatattgggttcctactaaaaaaactaggctgttattagttagatattaaattgcctgtggtgactgctagctgaagttaataacttaaaagaggcggtgaaacggtttgtcctatttgatatgccataaggggtctagagtactaagggctttatactgtactatatccaggactatcgaccgacggttatcgatagtggctaaagtagggaatgattagcgtagggatgctagttgcggtttttgtaagaccatctcattagcgattatacgggaagtcttgactctttcctgtagctaatctacctttttagctcatttatatggctaaaaacgattgatggactgcttatacttaataccagaccgcttatattacagcgtggtatatgaagtctttaagtatgattcgttagtccgtctatttgtactaagaaagcagagtttaggatttgtttctaatccaccttatatatatttacttattatttgatcgcagttaggcgaatatatagcccgataatcagtcaagtatatttttagctttaaaactccttggcctatcccgcctggtgattgcttatctagagactttatctaacggatgattgaaaaaataaaaaaaaataaaaaatgattaatcgttttagtttttaattatcccttgactcgaaatatatttatcgcaataagataagcttttttagttctatttcactctaataaactaagagaagatactaaatagcttttcagaccatttaggttcttagagaatactatcggtgtctacatcctctatagggaacggtacggcttggcgtttatctttaaagactaggtaatgaatgattggaatcacgatatcacttattctgtgaagattctgcccctaggaagctttaagtatattgataaattctcggaagatctcaatgcttagggcaagtatcctgtatttattaacacttatctttcttagtaatcattaaagcagggagacgtatatatttatagaaatttttggcctaggactatcatagctgctgtaataagataacagtctaataatcctatagccgaactgatcgattaagagctatagcctctgtccaagtcttcgtaaatctaatacttttcgtcgtttatatgcgttttgttctaaatcccgtgggcatgggaaaattctttctattatcgagtctgtgatttcggcttctttgtttttcactaggtttcctttcttttttggttgagacctaagttagtccctgttaataataataatgttggtatagggggattgcatactgctactatagctacggtatagacagaccgtgtggtatagttctaatatattagagtggcgaatagttccttataaatctttaatgacttggagcctaatgctgccagataaatcatatatataccgttccgattgcgacttctctataatgacctgtaaggagcgaagagcttcctaaagtgatacaattgagctggcactagctacctgtaccaaaatggtaaatagtctattaattgaaggcttcgaagaattgaccaaagcttagagtctcagtttaatctctttctgaaagaaagtgtcttatagaggaagtaatctactttgtctgcatttcttcgttttatatagaattgatagcttctagctattttctcctgtttaggcgtttgtaatctttactttagggctggtaacggtgacttgaggtttcgtaggtagttgagcggaaataccaggcgacgaggaatctttaagtgtggtaaagctacagcctatagaaagttcataggcaaaggcaggaaagcctatagagagtgtctcaagctatgctactttaggaaaccttcctagatccactaactgattatattccacgatagttatagacggcaatgatatacccctgggatttccaaatgataagtacgatacctagaaggatatgccactattgtatataggctctatcactctttcaattcctttaaatgtataatagaatgaagatatatcgtagatctcattgccctcggccgctatatcaaactcccttatttctatatcgagtggaatagacaagtaagacctagtacaaagttgttctttaaaaccggccatcaaatccaagctatctcgatttatatcgacaattctattagggttttggctagttagttaaatcattggttctatacagatatatgtaccctaaaagtataatagcccttaccacgtcttctaagttttgtattacttgccatacagctctaaccagagagttaagggctaataagagctgtaaaatagtaaattctccacttagaaagacttattctaataaagctccgatactggattgccttactataaatgcctaataggtcacgtccttagcttaagctgttaagcttgccacaatatctttaagttatcagactaggtgtcttccttctttaaggagcttaccttaagatatattcttcttcgcaccaatactagtaatcaaaaaactaataacagtctcgcctacgtgtataagcgcacggtttatacctgggggtagctcgctagtactagccacagtgaatatttccgtaatcacagtgttcgatagtacctggtagccgataagcattcgaacggaggtagtgataattgaaaacattaatactcaagtgtgtagacgatattactaaatccagagaataagagctacctgtaggctaagtaggcgggattagcctacatttatgtatctttagctccacaggtatagtcactgattacctaattagatatacgtagcacgttgctaaatattgtggagtaacacattattcttggatctaatataagtatagactgaccattccgaccagaccttataatctcactagagctaatatgaataccgaaggtcctcaatgatattatttcatgattccatcagatgtgggtcttacaatgaatgaatctatctacttctaggttgggttgattgtactttcacgatatcaaatattggaagatttttgtttcaatatattatagcctttaatacgacgataaatagacgctttgatttatctaaatagcattttcgattatctgtaaattctcttctacctagaatattgatatttgttaagagaaatggtgaaagaccatgcttacagctcgtcgtagatatagatttagccgtttactttcttttatttcttattgagctttgtcgaaactagtttaggggacttaaaagacatatacccctagagcatattttctatgatctgatgactcgttggacttggttagcctaataaaccgctgattatactctaagaccagaagctataatcatcaatagtcttcaaacgatctttaaggattgaatgaggattaaacaataaggttgtggttagatctattgctttttgctgtatatatctagcacaaattatcctcgcctttatttaaagtgacgttgcgcttacctagctccctgactctaaagcagcgatatatataagcctttattgagaacctaaaactctttttaatcttttggaaatgcgtatacttccctaatacttgctaacaatctacggaaccaacttatttagtagatcgaaggctgccacagggtagaaatagtaggtaacgtttgctacagtttcaacttcgaattttattactatatcgtccactagccgtttccaagcaacctagcaagcaaattctttatataagcgtctatttagggcatgaagtgctctactacttacctaccaatatactaaaatgtaatctagcgattccttaaatgtaaactatgctatatataggatattaaattagaggggtgattttttaagtcctcgaagatcaattgaataatggcagacctgctattcccttattagaaaaatcgtatagaagtaacgcggaaacgccaagcgtaattattcattttctagtcgatccctatttcttgtagagcctcgatatatttgtgattgcatttgatagaatcttatgtttagtatgttattagtcgctctgctatcccttttccgaaggtttcctgtgaattttttaaggctataataacctttttgtatagagtcgccgatatagcctgataagctatataaagtatgaataatgtgatgaaaaagattatttgcggcaggttagatagagaaaatatagccgagatatatattactttgtggttctttttttgaattcctaaaagaggtctcttgttctgcgaggaatataagctcccgttagtttgcaggtatatataaagataacaaattttttatctctatgatagattcttctctgtactgttctttcctgctgtatcgaatgagcgacagtggctacgtcttgaatttctttagcgaaatctatatccgtatccgagtactgcatgaccgcgcgaatgtattttgtatccctatatgaatttggaaattccccaatccttagataattttgactgtagattgaagtaattagcttttgaaaggatatagtcttagcgttcctaatgttactggccctttctgaatagctggtttaggtttgatatatatcgttttatcctttgttaccttaacgaagctagagtagttctactgtagatatctaacaaataatacgccagtcgagcgcgcttagtgtttatactaataagagattgaggtatgtctccttagtgtcttggggaaataactttaattatcggaaagttcgcttaggtagtttctagtgacttctatcgagatccacattcttcaaaatatggtatatacctccctggcattcttatctgcgcgaattatatatatgataaatcatatttggacggtcgcaagtattatataaccttagtaccgaatttcttctgtggccgttagtataacctataatatggatgtaaatacctagaacttaccatagttgcctaggtagttatatggtgttgtaacctttattatttttgtggatatacagactgtcacgtggttaatagctgcctgaaaggtcggtcgaccttgtacactgggcggtaatgatctattatttattcagttcgcagtaactaagccactaagaacagactgtatactacttcttactgtgcttcgagttatatgcttctagtgtgtcttaaatactatattgagatgttcctcaatctattaccagctgatacaaaactctctatcctttttcgcgctgagtgcagcagcaatataagctttagagaaggctacttatatatacggaaaagagacaaaagcctgctatcgcggaaagactttgataattatttctcttagaaccaaaaacccacgcggttcctatccttcggtacttggaggtaggccatatagtaacgtaaaatactagaggatgaaggaagagttgatattgttatgattgctgtgtgggtagagggtttggtaggcgtatatagtgcggaggaagctgcttctaggcttgaatatattgatatagggctgggtctaagaaagtcgccccactataaggaataccttattgaaggtggcattgctactgatgaatatcgtatccttgcggtcttcgaggggggaggccttgaatatgatgctgtcttcgaatatccttcatatcggatataagcaacaattcctagtctatgtttccttaggcggagattaagctacgcactggaggatatagaatatgagatctacagtcattcgggagttcgcgataatatgaaacgagatgtgcttgtggaagtaatcataggaaatcagctgtttttcccgactttgcggtacaagtacctagggtaaagtgaaaacctcgcttaccaccgaaccaagtctatcactaatcaaggatatcggaagacctaaaatcgttatatctcgaataaatttagtatatgattgagattggatcacttaattgctctgaaattacttttattgctaactgttgctattaaactatagggggcgggggggtggtattttactactaaggacagggttatttgtcattctctctttgtccctatatagtaaacggggtacgctcaatataccagcgttatatcacgctgagaacgactcctgagatccgataacgctttaacagcacgatctagatagaaaaacaattaatgtatctcaatgggacacctaatactagtatatactagtatctgtagcgaaaagaaagtataattttggtcatttataatgtactgagactgttcttgctgcttatcatttacgaccatagtatactactaggaactcgagtttcgcgctattttgcagcgatttaggggttgattattgcctagcttaggacgcttgagctgagagacttaacttgggataacaacgaggcgggatcagtaataatatataatatgtctagaggtattactaaccttgtccgtttgtattttactattcaaaatcgaaatgtgattatagtattagaattacaacagtggtgaggaagttctaaagttaaaggtaagcattcgagtataattgtgtgtctgagagtaggcctagcgatatagttttatcctatcattctagaccaggggaatggtctatatggctgtaaaatactgcggatagtgtataaggacttatgatactatatacgttcctatagggagataggataggatagtaaggggactctgggactgaaagtatctggaaccttgttagctcaagagaatatgtatgattgggtttagttgaatcggtagtcgaaaacagagtgatctatagagtgaatctgatttgcttttaacctacgcctaagttacaaggaaatcaaagttcggcacagaccatggaaccacgagcgggactgccaattagtagcgggactgtaaatcatttcgagagctcgtttggatgaaccatggaaatgccgctcggtgagagaatgtggttataataaagaatttaagtctaggagttttcctacctactttctgggctgcttgtgattaagcctttgcagcctaaaaatgggaactagaaaagaattactataatctccatcggccggtatataggataaattcactgcggtaagactaatattttattagaaagttcctttaaattcattatcttgatcaagaggcgcagattaattgaaataaagtttagggctgtaggagggccggtctacaataaaatcttatctgggggctaaccggttttagtaaaacggaggtattttatttaagcttatatggtttgtctataattggtatagttctttacaatacgtctgctagagttattgaaatagcggtagatttggagatatagagaggaagtgttgttatagcctaaagagagcaataatcatcggcttattgcaggagaagatacatagcatctagaacgtcctatagactagataggcaaatttcagcttaccacttgataggggaacttaccttcttatgactgcgactaagaatataaccatagatcgggttgtagcttaccattgtgtcgctaaagtctgcgtgttattccaaatactcacctgccccagcagtacctcctaggcaataatcccccgttctatctaatcctgacagcggctaactttaggcttgtagatcgtatctggacctttgcaattatttccattttctctctataaatagaacctccctgatctactgttccgtgggtcgccgctgagatctgcatcgcagaaccctacctgcgtctatctaagttcacgcgtggtgtttgattggcccgtcgggtgctattcgtctccagggtctcatcagtgtgatagtaacgttgcaatcttgggagggggtggcgatcataagggcctagctcgtgggccttggttgcatcagttcacatggttgtcccggaaactagacctagtttcttgtctgagcttttcaaaggtctgggccctttttagctatcatgccaaagaaagacaatcttcatcctgagattcaagtatgccaaggcctacgcgcccagggagtagatatttagtaaagacaacataagtcagctgcgagtagaaataaaagtcagcggcgcgagcctagagataaagggttgactctagtgagaccaaaatgtcatccggccaaccccaggtacagctcagcgtttccgtcgaccacaaagtatgcagcccattatttcggcatctgtcgaagcacttcaaccctcattaagaaatggtaaccgtggttaaaatggggacatgtagaatgtaagcgcgttgagcgatttaattgcaaattcgatgatatgtacgaaccatacttttgcggcgttgctttctttttaacagttgatgaaagtggttcaccacactcgacgcgcaattttgggaggaagtaggccaggtcgagacttggctctgtaggccacaaagtctccaaacacccctttaacgtcgttgaaatcgcttcaacgcttattaacgagaccgtgactctcgctaccaactgcgcaactggttccttggtagagacgtagccgaaaaaaatataaaaggagccggattcccagcctaaaaaaaatcaggacttcggtcctcacactccgatgtgtcatggtgtccctctcttgtctgcgggcttgagagtctccgtgacgacggctgtcgctgccacgagcccagtgatgtaagacttgcgctccctcgctgccacgagccaggcgagtgtaaaaaggtgcttcgcaggataggtctgcgtgaacaacaatcctcgcagggggggcgctgcgttaccaagtgaactccgcagggggacgctgtgatgacaagtgagacccgcaggagaccgctgcgttaacaagttctctgcaggagaccgctgcattaccaagttctctgcaggagaccgctgcattaccaagttctctgcagcctaggccctgcgtcaacaaagcgcctcgcagggacatctgcgacaacaagcgcctctagcccgtgcaggcacctcttcgtggtgctagggaccagtattcgagtgttccaagagtattcggagaagcaaagacctgcgcaacatcttcatcgtctgttcattgttccgaacggtcatcattggatacatagaaggggccctagttagatctttgctaatttaatagccaaaaacataaactaacaactgaagcttcttcagtaccaaatgacgtatttcacattcctttcccttggtagcttgtgatgcaatagcttcctcactataatagaaattggcatctttcatccagatgtatgcaaacagagatgagtgttgtcttggaatgcttgtggtgttgaaccgttggtgttcaaccgttggtgttaaaccgttggtgttgatgtgagtgttgatgtgagtgttgatgtgagtgttgatgtgagtgttgatgtgagtgttgatgtgagtgttgagttgagcgttgatgtgtgtggtgatgtgagtgttgatgtgagttgagtgttgatgtgtgtggtgatgagcgtggtggtgaatggtcgggcggtgaaggaggtggtcaccgtctagaccttgccatcggtccatgccaccctcagattatgtaagtttcctgaatagggggttcaacttttggaaatctatcacttatcacctacccccaataaccactagtatagcagataattgatcataataaaggtgaaccctagtatgtagtataactaatatatcgtgtttataataaattactaatgggctggtaggcattatattgtaagtggttttgtagcttcagcatgttttgtagtcatatatatatttacgcgcatcacaatttctatgtatttcggatcacactttcaatttcacttagactcgatagtccattgcttttactaggtttggttatagctgaacacatccattgtatacctttctactcaaataacctgaatacgtagcactataggacatatacgtgcgtggctaaacattataaaattataaaatttcatatgactgaagtgcttattagtaaacgacacatgggcccattaaatgacacggggctacggtcaaccgcctgcccataggcaggggtgaaaaaactcagtgcgaatccatgggcctcatggcccgtggcgaggtctatcaatgtctcaccgacatagtacggagattttcatgccatctcacccacatagataaatgtgtcaactatagattctatctcgtaagcgaaaattctagtcccattctgatcactcggtaaagttggcatatagcgtcaatccgatagggatagtagatccactggttcaactatgaccaagcaatatgccaaggcccacgtgtagaagcatgtgataaggtgaacgattggcttgaggaaaaccagctatgcggtaggctttgtgccttcctaagtcgaagtcatcacttcaggtggcgattgtgagtcactcgaccttaccctatttcagctcttatatcccagagagcgcaagaatcaaagtgatattaccagacaaccatgttactgagagatttggacaagcaagcaatcaagaatacccggttggctcctactatgcctcggcaacgacagatcatatttcaaccaatcccggatcgaagtgacagcaattgccttttgggaagtggtgtcctaagttaatgcaatcaaccatattctgctgataagagaacacggctgaaacccgattgaacccgattgggttctagcagtgccgtctgaacaaatttccattgggtgatatccccgcaggagtgctagttcgctcgtagtcgtagtagacaatccggccatccttacaaaatcaaccatcatatgagtgttgatcgacggtagaaaatttgctcgaggatctaggggatagtccaagaggtcctataaacagtctgattcgatattattgcggataccaaagtctttacagtggctgcctggccgaatagtaacatgcccacgtgtcctccgcagcgcggcgggctcgacgaatatatgatttaaaaaaccgtcgaaatagggatatagggaatccggatttcctgataagtgcgtgatatattaggagacgatataaacggataaaggatatgcgcagtcgacttgactaacctgtagctgcagtgacacctagggtaaatggtcttaaacagtctgattcgatattatttcggataccaaagtctttacagtggctgcctggccgaatagtaacatgcccacgtgtcctccgcagcgcggcgggctcgacgaatatatgatttaaaaaaccgtcgaaatagggatatagggaatccggatttcctgataagtgcgtgatatgttaggagacgatatgaacggataaaggatacacgcggtcgacttgactaacctatagctaaagtgacacctagggtaaatagtctttgcaaatagtgcttcagcttgataggaaatgcgtatataagaaccaaccgggtataccacaacacttttgacagcccttatgatatagcttcctatatgcccgaggtgattcttaggtagtgagctcttattggcttacctgtgccccgatcctatcctctcggtttgtacctaagataaccaatgttaaattgtaggctaaaaatgagaagactttgcgtctccttccccttgcaggtagacttgtgctaacagcctgattatctgcggaggtacactcatctgctaggaagcaagacaaaacattagcattcctatatcttttggatttctaggcctaggaagccaccaaatgtcatccgaagataacgaggatcacgcattcgataccagcagcctacgccacttgaagatattcgaaaggttgtatacttagccacaggtatgattcgggtagtagtataggctgatcggggttcaggagttgtatcatatagataaatcgaacaatgacctgatatacagaatcaatagggagaaagaggccgaggtacgcgatacgaaccttctggtaacttatcgtcgatagtagacatgtggaagggacagagagcatgcgacagtatttgtataggggagctaagataaccaatgtcaaattgtaggctaagaatgagaagactttgcgtctccttccccttgcaggtggacttgtgctaacagcctgattgtctgcagaggtacgctcatctgccaggaagcaagacaaaacatcagcattcctgcgcctttttccacttctggaaagacatcaaatgtcatccgcagacaacgaggatcacgcattcgataccagcagcctacgccacttgaaggtatttgaaaggttgcatgcttagccacaggtatgattcgggtagtggtataggctgatcggagttcaggagttgtatcatgtagacaaatcgaacaatgacctgatacacagaatctagggagaaagaggccgaggtacgcgatacgaatattctggtgactcatcgtcgatagtagtcatgtggaagggacagagagcatgcgacagtatttgtataggggagctcgagcagacaagacatttgttcgcgtggtattcgactcgagtgatagaaatgagggtgttctcctgttatacgatccgagtcagtaaggattgacctagttggacgagttgccgtagcgtacctgtccattgaaatcccaaggtgcgcttgagacgggacaatcagtttgcacaatggttatatcggcttcacaactagattacttacagctctcagcaatgcagttaccagccatgccacgtcgcattcaagcttatcgcaatcggctgtcgcttaaaaagccgcgctggggtatataagacgatttgttgagacagtaaatgtgtgttacgaacccacttgcgttaacattgtacttctatggtggatgaatgtgttgcgatgccagaggttcaggactccacaatagtgcgaaggcggtggggacgagggcggaagacgcgatggagcacgctcgtcggccgccaccttggtcttatcttcgatttggcggaataggccactcgccatagtatatttcaccatcgatgatggggtgcccctacaatagtgtgaagatgttagtggtcattaagatgaattggagtaggaattatgctcgaggggcatttatagctgacaattcacacgaggctgctgttatttttaccagtgctttatcacctaggatcgactgcattttcgaagagccagtgaacagttagttcaactattgatgctcgatctcgccagctgctcacctcgaattactcaccgatatacgaaaaggggggggggggagagtaaacgttgtaacatcgttaccgaacctacggaagggaaggtagtttgtaagtgtacttctggcgcattgaatattagatattaagtagacctcgttgaaacttaaccgtgacgttagtttgactgtaaaacagttggaacggagaaaagcagatttagtgcgtttgagtataatatagataccagttgacgttggtaaccgccagtctcgcattatactacggacctactaaacctaggctactaatgcttcttcttagtgaccgcaccaaaagcgtttgataagtgttattatattattctgttttgaataggcctccgtatattattgttatttccaggtcccaacgatctcctcaaaactgccgtcctccttccatgtaccacgagcacgttgacaatggatatggggaaaattcgctcttcgggattctaggggcttaagcgaaaattctatgaattcaaaaatgcttttcttctcagtatctgtcgatcaaagtccctactccttcagttgttcctatacttttactccttaatttgaccacataagagtggggacgcactggagaacctgggggtggggcaatgagcgcgacacaagatttagtgtcgcgctactcctgtttatccgtgttttcgtacgcctactttaaggagacaatgtcaatgagagtttcttgatagagctatttagagtatggaagtgataacgtgaaagaatgtagacaacatgttattttcagctagctcagttcaagagtgaaagtcccttggtcctgcctgcccgaagaaggctccatatggaagagggaactccgtgagagtaacccacttttggtcctaccgttacgattgcggatactacgattagtcatcaccctgaaagtcaatcatcgactaatgtaatttcgtcaacagtaagctggcgaaagagccaaaactaagtccaggaattagtggcaccctgatacaaaaagcgtgtcgcaacgtgtgtcgcaacgtgtatcgcaagggttgcgcgcgtactgcctcggcttttatcacaatgcaccaggggactatttaaattcacaactgtaccataccaaaccatcgcttttcataatagcttagggctgggaataacaacctttatattatcctacaatccttataaatatcaaaaacatgaccttctctatcttcctgcttctccctagcgtttacatacgcgctgccttctgtggcatatatacagttatcgattatgatcgccaatgtatgatatggcctgatagtaactatggctgcacggaacattcagaaccttttgctctccttgatggagatgactgttctggtgagtgatggctctacctatatatttttagtattaacgaagccctagatctcagcaaggttacatatggtatccgtaaggaccactctaaggtcgatatgggtgtattcggcacagtgtgttggcagctcgtgtattactcccgttctgccattatcgtattcatcagtatcgtctgttttagacttgtcttcgtgggggccgtctccatcctccacctctgaatcatctagatagatctcaagctgtactaagtcaggataagagaaccattgggcgactatgttatagttcaaccgccgtccccggctcttgaattgacccattatcccctctcctcttttgttctgggttttgcctaccggtgtttccatatcactagcgtgaatgcgaaagaggctttcttgagttgtgcttctttacgaatattaggttttcttttgccgagtaacctcatttgttaaaaccagtttatctatttgtatgtacttgtttggtgtaaaacgctgatttggtagcttttcggattggataatacagcgtggatggacggataaatgaatggatggatgatttcatttaccttggcccttcaggaacgatatttattcctacgatcatgtggcaagaatgtaagccgagatagaccaggttacatcgatccctgacgagtgaaataagtgtagattgcaaatgatgtaagagaagtattctgacattcattacaccaaatcaccttgcatttgatgggtataatatgtacttgtcaaatccttcgggaactagaggtctattttcctttgaatgttaacgcagtatgggcaagattgactatagccctgaccttttctaccgtgagcagggtctaggtatcgtgaaacttctcctaacacgaagggcgattgagtatcaagtctcctagcgaatctctgcatcttgtttgacaaaaatgttggcattattacgtgcaagatagtgactatgtggtcatatttgcatacgagtcgagctacaatgaggagaatgaggagtattttaagataatgcaaatatatgctacggacggggccaagccgctgaaggccctacatgacatatcctgccaggggattggggaaccttgtgcaaattgcaagcacaaagtacgctgtgaaaacctggccaggtgctatgaccctgtgcctacctatatgccatctttatcgctgccattagtggaaggtctggtgtcggtcgacgtgcttctgtgcgaaagagggccaaaagctgtacaagatcatgtggttgccaccattcaagcaggaaaagcagatataactgatcatggcagcgagaaccatctacgtgtacaatacatgtacaagttcgcttcggttaacaatatctctataggatcgaaccattcttctgcagaacctcatccagaggttccgcaaaatgatctgactccattaatatcagtctcgcacgcatatgtgaagggataatccgtactcctttcatccgtatgtgggataaatagacgcattgggatatcggaaatcttcagccttcgaagtctcttatatgccgatgcggaggttttgactattagagagcaaccaaacgatccaacccggttcataaaacagattgagtgtacggaaaggggacatcacatatgaaatacttggctatccccgggatgacattggtagcttatgcaatgacgtactcgatactggaaagctactcaagattgattgtgtgtatagcatctaactgtgctcatgttttaggtgattgccacacggtcgaggctgagccaaatcgcgtaccccggtatatggtttctaatcatacgaaaacggcgacagggataaataaatctatgttaacccacaatacattctcgatatctggtcgagcggcggccctatcgagtcgggtatcgattcgatgctgatcacatcgcgaaatggtctggcggcacggaatctggttggttgggggagaggggtcatgtgatcgctgttcagccaatgaacgaggaagagtccgccctattgcggacaaggatcccggctccccactctggagaggacgagaaggcactggagcaggcactggagtaaattccgctggcaattacccaggcggggtcctatattgcgaatcgatttcctcaggtcacggtcccccggtgccttcagttgttccgtgagagcgagtcgaatcaggcatatcttcttcagcacgaggacgctaaggacctccagcgggaacctatcattcggcatgcggtgaccacaacgtggcagctatccttcgaacaaatccaccatgaccggtcggcggcggcggcggatttactggtgttaatgaacatgtttgatccggcaggggatcccagaaggcctcgtccgtgccgatggtaataggctccagtttgaagatgcaatggcaccatcgatcaattattctcttgttcatatcggaagtgaaacagtgtcatttgatatgcaccgacttgtacagttgtcggtccgcacctggcaagagattcacctcgagctggcgcgatggcaagagaaggcacgagcgaccatggcagagatgtctcccaatggggagtacgagagctggactgaatgtaaaaggctgcttccacatgcgcaagagggggtaaaacctagtttcaacactgatgaggatgattccatgaatgatgccacgattttatctacctgtggatggtatttacatcgccaaggtgcttattttgacgcagaagcgatgcgtcgacgggcatttgtacgacgagcgaagatgattgggccggagcatccttacacgctcgccagtgccaatcagttaggcttagtgcttgacagtcaagagaaatatgaggaggcagaagcaatgtaccgacaaggactggaggtccgagagaagcttcttgggccagagaaccttgacacgatcaatagtgtcaataacattggccatctgctacgcaagcaagggaaatttgcaatggctgaagcgatgtatcgacgagcatcatgttacggccaacagtgtcaataatgttagcttagctcttggtagccaaggaaaatcgaaagaggccgaagcgatgcaccgacgagtatcgggagtatttaagaatctgtttggacgtgagcatccccttacgcttacgagtttcagtaatctcggggatactctcgacagccaaggcaagtatgaagtggcggaagtgctgcatagacaaacactagaagcacgagagaagatgcttgggtctgagaatccggacaggcttgttaatatcaatactctcggcaacgtgctcctcgctcaagggaaatatggagaagcgggaacaatgcatcgacgggcactagaagtgcgacagaaggtgcttgaatgtgagcatcccgatacgctcactggtgtcagataccttggcaatgtgctgtccaggcaggagaaatacggagaggcaggaaagaggtatcgacgggcactagaaggatatgaagagatacttggtcgtatgcatcctgacacgctcacagtaacattcgctacgtgcgctccaagcatgggaaatacgaagaggcggaagcgatgcatcggcgggtactacaatagaatgacatagagagacgtctggacgtgaacatcctgttgtgatatgaggttggtgcaggtcaggaagcgagccgcaccatcggaattagctccgagatgtctatacagacaaccaagttgatttccaatcaacttggactttgtggcgtatatatagcctcatgcttccctctaagtaaataagcaattgatatacctcttgaattacaacaccgacaacgggaactttgccaaaggcgctgtatgtaaactgtggacctaaatcaaagtcgcggataattagaacaaaaagaaatctcagtctcaatgcgagcgaacaagagaatttctttgagaggttgtcaagcggacgaagtccctcagctcaccagtggaggaagggtgctagacaggagcttcggagtaacagatgtgtaagctatgcagaaacttcattgcgcagagatcagagcagacccttgggcgtatcaacgactaggttattttcacagccgggattataaaacgactattccatctcactttcacgataagcaagcttacgccttatatgctgtgttcttttatggcgggtaacgtgtcagacttccgtgacgtagcttcccgacacacggccattttccagtaccccaagcagatttagctccaccaaggaccctcctagtgacaagtcatattatgaactgccccggatgaagaaaatgggagattccgcgcccctatacgtctacaagattgtcccttctacaaaccctgttcgagaaccgcttcccgagcgattaccagtcagccatatcgatcaatcttcagggttcattcaccttttaacagctccgcaagtaccaattgctctcaaagctatttttgaaagtgagccaatggtatatgtcttccggatcccgtacaataaagttatgcaagacattcgttgggagacagcggacggtgcattgcgcgaggctctgcccgaagaggatttgtgtccagtaagtatctgccggcgtatccaaccttgggacttaagactttgtttgatcccgtgtggcagaatgtgagctcaccaatggagtagcatttgtacaataagttcaacctaggccgagacgatgtcgagagcatcgctgtgtggataaacgagaacgggtgggaaaaggttctatcgcagactggcacgtggcttttatattgagggtagcctttccgcctatcttgttaatgtgcttatttgacaaccatccaattgagttgcccttggatgaactgaaactgttccacaaatcaactgcctcatccttcctttaacctcgcaaaaagggcttcagtgtcacccaagtgaaaatcacacatcttgaagcagtgggcatcaccactcagctagactagcaggagcttatctgccaaaatgatctttaccctacaccgcatcgccggtcggcacgactgaatgcccatcgattgtagatggtcacggttctctgcacggatgtgacaagatggagttggtatagagaagtgataatcatccaatctcctgtgacgttgatcagactaagaagcccgagtagtttgcgagggaagcagcttaatccatagccgggatcaagggaagaagcaagtgcggcgggcatacttattacgatattggtctgttgattcaaatatatccaccaaatactctggagctcggaacaaggcattctgcgggtcgtagaggtttttcgtcacatgtgttagtcaactaattagtccctattattgtgatatcttggatacgtcgctgttaacccactgcaaatcccagtggcagttgtcgactgcccaagcagtcgatgcgtgaaatgagggatatctctttcgatcagatcttagctaaggagctaattagaactgcatggtgctgtgccagcataaatctgccaagggtttcctatttcggctggataaaatgctaggttggcatgccaggataccttttttactactgtatccgcaatctaatcacatatctgtatcaattcatttattttatattagacccatccaaataaaatggcaatatcagtgttgtatatactcgaaaatccaatagaatatttcggctgcagtagtactgaagcgaggcttagtttagatgtcggataataagccaataaagatcgagtattcctagtttacatcccgtgattatgatctacaactcttatagtacttattcccatataccaatactctccctatttgccgccggttgcttggcacgctcctccaatataaacgggcctttttttcactcctttactatactatcgcttccttcgttatttttgaattagactagcaggctacaataatgcagcatgaaggagctatcttgatctactgagatgaaatgttcggggtgagaatcaaataagtggatttgtctaacctaggtaaacccccgaaaaaagaatgctcttttaaatacatgcttgggacccggtttactatgcctacggcacatagacctctgtcgatcaggggcaatcgacacgtgtggtgattcctattggcttatccacatgggacaacaaccaggtcagaattatggaggtttgcgatgcacctcaggaattgaattcccgagagaatataattaaggacaattctcaacattaatgagtcgtcaagccattggttcattaactaccccacacccaaagccgaatcttcacctcaaataatccacgaaccatgatcaacggcgaccaatattctgacgtatccgcaggggaacagctcactcctacgacatgggtcggaaatgaacgccgcaacgtctttgaagacgtcgttgcagatgagaacgtgttccaatttattggctctacaaaggggcatacaacgaccgcaagatcagtcatagccaagacgtaggcgacccaatgtctaggagatgcgtccgaaactacaatccagcaaatttcaaaggaccgcatcggaatcgcggcgaatattcaacctcctcatcgccaaccgcaaacaaaacctttcgacgggcccggtcgcacagtaggttagcaatgccgggtattttacctcgaaattctatatcttcatcatggatactctgatcagaatcgtcttaagattaaaagtacacaagggagggaagggggaggaaggaaggaagcgttagcgggggtattgatagttaagataaatgatataaatgggatgagatcgtcatgacgagattaaaaaagggggggatgggagctaatgagattatgcaggttccaagtctacgtgggcattggaatagataggagaaagggcgagagcggataacggccgagtctcctcttctcccctgcctacaacatataggccgaatctagaatttgatgtgcatggatatgcatgtaacctggaacctatactagaaagggtgaaatgatccgtgtacttcgtaactttcttatctttgctaaaattaagttcctagtatggatggcgtaaactatctccaactggcatggcgagtcatccagaagtatagtctcataatcttataggcttgctatataattgttcaatttattacttaagccacatagggagctagatgtagatattctgcgtgagtaacactcttcaaggcttgagaagcagcggggtatctataatacgttacacgcttacacagaagcaatgtcggttttcctcaggctattcgattcctagaagcggcttttgtgttccattggcagaataaccatgtcaacagatgcagttatccgttagcaacaaagtagtgagcaccctccgccacatctactacctttccgggcttccacgcctcattttgtcattcttcaaatattatcatcccgccgcaaacactatgtaccagtgtcatgataatcagtacagatccaaacgtggcttcatcaacagctccatagtacatgactgcacagtatgggagcctgtcaaaaagctcagaggcaaatcaagatcggtgagcgctgctagcgatagagcctgcaaaaaagtcgatggctaagctaagaaccacttggatgcagccgtaacagattcgagcgttacggtcctcttgtagcaatcgcagggagaccaagaagactgtggtcacaaaaaaagagccccggaggccattcctaattatggtaaaatcccgaatatatggtgtgcttatagtttagctttgacctacgctacgctagcacttcccacagtcatcgcagtaccccccaactgtacagccccgttgacaattataaggccactccctcctgtaccagcactctgccctacggacatcgcgctcccagctgcaatatttccgatccaactataaacggcagcggctgcagaacctatacttcgtaaagaagggtcattcgagcttcggggcgcgggaaacaggactcattttatttctcctacaaggttgcacatacccgcctggatgccgcctactgtgaatcctatactcgatataattagggctgttgcgaggccaggggcagcgagaacaacagtaccagtagtgccgacgaccgcgcaggtggctagaatagggttctaagcaccccagctggctgcctggcatatttaagcactagagattagatccttcccggtacatggaagttgtatatgaacctgagtcgccaagttggcggactttacaagggcaggcttgccgtaggttacgacaatttctccgcctttctaccccgcgtgcacaattctagcgcctccggagatgacatcccctggagaaacatttcggaaagtcatggctgaggtgggcaattactggactattcggggggacgaagctgtgatcgtaatcagggaaagatgaagttactggagttaccagaggtgcctgcctatgacgcaagggattcctctcgggcctacgtaaccccggtaaccccggaccaagtacagggattctaactactattcttagtagtaaaatacaacataagtaacagcaaagtagcgaggtgctgcgatgtacgtacttcggctatttgctggtaagtgcgaaaagaaattattagctttcgtcccccaatatcggaacttcaaatcctcgtgtaacaaccgtagtcatggaccgagtatatctaagacactcgctggccaatgcatagacgtcacttatccttaactcacgcgaaattgatggaattaccccgagacgcctctgaaaacctaccattggaacccctcaacatgcggagaaatcacctgcgcctcagtccgcttatgaacgaccccctcactcctttgctggccatgtacgacccgttgtctccttgttcgcgtggtcgtttcctaccatactcaaagataccagtcaccttatctgacggattgaaggggccgtgggagggtaagggactgggcgccataagctcggcgacgagtcggccggcgaaggtaagataaggcttgtatgggacttttctccgtcaaattgtaggccatttcatggggcttgttgtaaccctcggcttcctaagcctatttagtagctcgggggtgatttacgtctcgtaacaaaatatgtattcccagtctaatacgttggtcacgagaagaggaagcgaatcagctggggcacgatagatatatgaagaaacgaacaggccagaaacatacggtgtaaatttttggttttgacaaatggagcttgcgctcctgtagctgcgtaagagccaataagtgatagagaaaatacggatcttcggtccatttctttagggttgtctgagctagtcgctcctggcagatactcgctccaacggagtttataactcccattggtcctggataaggctcaaactgtctccttcgatctccgttgacgcttgtgtgatgtatatagcctactaaccagggggagctattatggatgtgatcgatggttactttatgacgataaaacacaatatagcctggttagttaacaggtcgaccttgaaaataaaatggcgctccttactgcttagtagggttgttagtaactcctatggaagctgtcctgtcagacagtagcttgtacctagagtaggaaaaatgacgctccttacttactaaaatgttgatgagacgacgacgctttataatagggaataggttcatagtaactagttcagtatcgtttgatgacttccggtaaggctttcgacgatcattgttcctgtggtcgttttgagtagattctgcacagatagggggagttccgatatcctcgaatctacaccccaccaaattaaggtggtaagaagtctactgcagaagattaatgagggaatcacggtagtagagcacgatatcacgaaacgattttggctgaggattggccgctataatatagataacaatcgcgatgatctttgcgatatcggcattattataataatgcctaatcaagatttccactgcctatcgggcacctctgcccttctttgatatatgaccgaccaatcaccttataatactgggagagttggacgcaaactgtaaaccagactatgctgctagttaggccagtaacgaccgcgaattaatacagtagttagtctagatagggaaatcactaatgtaactattttcatacttcaactatattaattatagctgtgtgttcctaacagaactcctaaaatagagaaataggtctgagaggttgtttaagttttaccactaatacatttgccatacaatcgctcatcttataaaatacctatatgtatacactactgtgaaatagaaagataattcttatcgctttatatgaggtatctacgttatccgcaggagaatgtcaagggtttaggcaatagctgagccgctaggcctctatagtcgccagtcacaagagaatgaacgtagctttacctcgagaacgaccatattattgagagctttggcttaggaatatctaatcggctccttatataggaggcgtcgcaactttataaatagttctccgtcagtaaatacaatttgtgatctcccaatctctagtagaagtccacttttagaaaagagttccagataattagatagaacggccaatctatagattctgcattaagctttctgcgagtaggaaagtccgatcagatcttaaaataaccatttttataccagtaaaactaccattggatgtgattctagacttgttgtaggactatcaaacaatgttcacggcaagattacagccgtctaatattaatactaggaatactatttactatttatcactgctataagggcaagtcatgaaataacacgactaccagctagcagggcacgaaaccattatcgacgaggtcactggctgggtgacattgaattgaagaaagctgggagtcatttgtggggactggcttggtactagatatacgaaataaatcgctttgcttatatattatttgtcagttaaaggatagaattacttagaaatcattcgggcaccgtaactgaatagttcctagccgaaggtagaatctgacctatactaggcctagatatgatagatcactctagacccatttaacggtagactggtttatgcgagttgtggatataaataataggctcgaggtatatacccacgctacccctatccctactcgggtctatatgactagtgttattattcagctcttataatcacttcgctatatgttaccctcaactccaatcaaacgtaaattcgcttcgcaaaacaggctgcacttgttctatatatctgtgtcagggaagtaggcatgatgtactcctaaagtgtaatgttaacagtatactatcatattatctcccttcgggtgttggctgtcgattctatctcgggcagtggcgtaaaaagctcctgcggcgctggctgaggctttatataggagctgccgtctggtacttgatcccgacttccagttatctcttatagtgatgactgtagtcgccgttggaaaaggacgaacgcaagtgcagatagtaccgctagtccggcgacgcttatgccgataccggtccctactttcgcgccagtcaagagtgcgctagtatcagatgatgcggtctccgaggttggagtacttgtcggggtagttgaggacattgggataaatgaggtcgctgaggtagatatggatatcgtcttattagatttcatgtagaaccccggggagtataaacgagggttagaaggagtaaagcttttcctagttggtttaaaagtgagcctatacttgttggtatctgatagcgcttccttattaatagcgactttctagacaaaagtccctgagtacgaaacatctattgtactagctattctgtaatattgtcagtctagtatcttatggtttttgtttagggatcatatactcgaaatctttttagactatatggagaaataggtgttctatacattcatctacagatcgctttactcgtgccgttcatatcacgattcaggatagaagaatcctaacagaccagtcaatggttaacgtagacccgatgtaataggtagtaacgaagtcttcattgtttccgctcggcgttctccaaatagttcgggttggcgcactttatgctacccgggatactgagatcatgagcagccatacctacgctatattggccatgaagtatagcagaaatgggagctcaccgttatcctataatgaataaaatgatgttgtttcaaacctaagaattcgagagagggaaagcggagggaccaggtcttggggaggtttattttaggagtcggaatagtaaacattcccctaagtcccaacccttacgaggtgcgagacaactagtcatttctatgtatggcctataaataatgctaagttaagtgtgcactagcaattagttgggaactagcaaccgaccaatatataataatgaatatgactacgaatgaccttttattttcctgtttaatctacggtttagatatgacgctattctcattcttatcttaagctcaggaactatgcgtattataggaccggtctttttgtgcgccaagaataaactgcatcccttaactgtcgggatctgccgtttaccgtattccgtcatattttcggccctcgaattgcgtccctcaagcttgcgagtcgtgtttttctgccaataggctccgtcctagctctactgagataaatccgtgtctccttgtgccaccgtttagacaaggtaaaagaaaaacttaactagcatttttggcgctaaatcattttccaaatcaagcagagcagctagtagcttctggctaagctctaatagcgtctagcacttgtaaagaagaaatggctgtgttatactctgggacgattaggactttatttcttactaagcttacttcgaaaatattaccgctatatcctctgttactgaccacagtgccaagtatctaactacattctatcacgagtaagtggtagtcgcttatcctattttctatcttactgcgcctgtaacctgtgatatctccttttcaccgtaattatttctagtaacagctacttttgcctttagatactcagtgagagagactagtaagagtataagggacgctgagttagtcaagaaacgttggctaactgttgaatccttcacggctctcttaattggggccctgagggagatattctatccacaatgacaggcctatatttcttgtctaggtcacctcgtctgtgagcgatttaacgttgaattatcgaaaagcgactacaattttatccctagaagtcgtggtctttttgcctagccccgctttagtgttatgttggttgcgttgagctgtgtgggtctgtctatctagactgtagaaagcgaggttacggtaggatatacaggtactcgacccgttaatctgttaaggcttagccatacatcgttaacacttatttaccgacagacctatagcttaacgcagctagcactaaagcgaggttaggaagacagtggccatgatttttactaatgaaatgttagacactctttggtcatttaacgttaggccgttagcagatgagatgtttaaatcataaaacctgggcgtgccattcttaatcaaatagctcccagtctacagtaagaccgcaagttaaatactatggaggattctataagccagccaaagtttcttaaccgatattcttaatacgaccctagctctttctaggtacgtatctaaaatggcattaagaaggttgccgccaatagttgtggtaaaaacgaagacaagtttcgataggcctctattagataggtatcattcgatgcttactaccaatcagagcacatacgtgacacgatgagccgggaagtctataaataagtcctttccttacagcaatttgctctataacttaatcactcggctgcacaaagtcgagcaggccttatacctgaaggcgcttgatgagttattcccgtttgaaccagcactggtttttccactctgctgacatttgtagaatatatctgggagtagcaagccggacagtatctgtgagatatagttcctagcagatctactggattaattcactattatacagatatgatttacactttagttgagtggaaatttctgacctaggttcggatttaaccgcaactctataccaccctcgcttaagcagataagtagatttcccctcagtaatcagtcaaatgtaggcctctttattaacaggtgcattatcgaatttttcgcctcgaaaattggctttgtcaataagcttcatttactgagtgacccttctgactattattctgttctatgcgaaaggttagctttttgaccgccttacctaggaatgttactgtcttcagtagccggcatgaatatagatggaatgaataccttagtgatacatacgaaacgatcaaacctaggagtatatgtaacctcaaaggctcgtataaaaaatgtctcatttatttcgccgcgataggagattgcaccgagcttcttcaaagcctattgggcctcggagctccatttagctatcgtgattagaataaacgaacgtgcaaaacgtgcaaaacgcgcaagtgtgctaaatcgattgagattcctctaagaatgagaatgaggttaccaagatcgacttatggccaagtaaaggccaggaatatctttattaagctttccactgttattatcggccttaaagctctagcagcacagatagttatacgcagtctttctagacctaaggctgccagaattcgcggtctaagaaagccttactccaaactatagataatggtctatatgagagaagatttgggatttgcatgtatagtgccttataggccataaaataggctctagtttactgtataatgggtaacctcttcattctcagcctctttatcctcagcgcctagactattactggctttttccctgctccagctcccttacggccttattatatatatggtatagggcctatgaataattgcgcagccttttaagtttatagataaggttttcccgattgtgtttaagcagtgataccagctccttggtctcacgaagtgaacagtagaaacgtgctcttccctaatgaagcgaagctataccaacttagtaaggatatttacgcttttgtatagtagacttacgatggtatccgtaaccgggaccgggcgtaagggcagtggatgatacgctgtctttattagtggttattatgcagatttcctttatggtatactaacagtcggaactcatatgggttttatatatcatggatgggactgcgcttggatatttatacctagaccgagtagctatagaatatcggggagtcgatatgcctctaagtctgctcctaggattgaagtcgtgcctcccaggacctagaattggccttgtcagggatatacgtaagcgtcctcgctgagatagaaattcctggattaatcaatcatgccaattacttagttttggattgttgtacgagtattatgtaactattttaaattacgtataagatctactgttcgatttacttatttcttcgtattggcacgggaggtgaacataattcggtctatctactacaataaggaagctgatcacggctcgaaataatactggtcacaatatatgattgcccacaaccattatcgaccgtatcttcgacctcaatgtatttacgatccgagcagggagcccatgttagggatagtgtaatttcgaaattggccaggccatttggaaatgggttcaaaatatcggtttcaatttcagatttgatctgcaaactttaccccaggttaagttagcttggcctaattggaccagttcggattccaattcaatgctagccaaaatttgtgaaattttcatacacttgaaatttcaccaaccatccctactggatgttgatatagcaaacaagccaaaaagacggatgcctgctcgtttgaagattggcgggacagagagcaaaccacccttagtaggcgcagaccttttattaagagcgaggggtcacatttgaatggtagtagcttcttcgacgcattagattatatctaacatcatcggtagcgcaaagctatcaaattgcgcgggttgctggctgcattaagcgtgctatcccgagtcaaagcagaccgaaagtaatctctttttagttctacaacctgccgggtcggttgtgtgagaacaaagccttcgggtggccattccgtgccaaactcattcttgagggcacttgagggaccacactgcgtggacgagtaacaaaatttcgttactcgtgagtcccatcgactgtactggatggatgtaacaactgcataattgaagccgcttatcgcctggagaatgtccggatcctcgatcttcacggctcgggccaacctaggggtatctgtcaaatttcaagacaccaagatcggccatcaaaagttgaccactctctccagagagccatttggcttgtcaactttgcagtcaaagctctgtgatattgctagagtcttcctctgcgcgagatggcaccgtcaacggcaggccgaccaagttggccagcggtggtatgaagcagccatccgcaactaggcgcaagtgccgcatggctctagagttgccgctccatccattgcgcatctgggccagcgtcagatgtcatcagtctccaggagtcgccctgcatcaggcaacaccgacaggtcacctcacgggctcagacaagatccaccggtgcggctgtcaaccaaccctgagccagtgcaaccattcaatccatttgtgacttccacaatgctgcggacaaacagtgttccatggcatgtttcgccggctcaaccagcgatcctgacatcggtcgctaacgtctgggctggcgtctaaagcttgacgctcaaggatctcaccctgagtgacgagttcgacgacatccactgtgtattttgtctggccgaggatgatgaccttgcaaatgagagtgtgatcttgcgctgtcagtgcaaggcgctttcccacctggcctgcgcggaagagtggctggaaaaacgaactacgggttttgggacgtcatgctgtgtgtggtaagtaggggggctggttccaggtatgcaatacccaagatgctgattaatacagtcgaaatgaagggcctttagacgctttgattcgcccaatacgagtccaatcgtcggatgctgagacacgtcatatccacacggcaactgaatcatctgccgatagagaacttgccactatcaggaattcatcaccaaatgacccgagtcagagccagccgcgtcagcggtcagtgggaccccaagtgggatcagttgagcagagcgtggagaatgggcccccgtcgctcggctaggctagtaggggcccatctaccaccaggcccttctacgtctgcaccgccccgccggtcagcacgactaaattccactcgaaggtgatcttagtttacagcgaaggtgtgacgggaatgagaaattagcgaagcgactgtttcacgcgtgaagacacgtgaccagacacaccgcattcggcccagcaacaaagagcatagccgtggtatggagttttataacaagtttagaaatgatacaaatgaagttctggatgttcaaactcgcagagcaccaaaactaaaaccgcgcgaccttttcatctttgcaagtactagatgccaatgcacccccaagaactgttggcagtttcgcttaattttgggatatttttttagaccgaaaccatattcatacccaacggtggtggccaaagaactgtagacatggtttatctcagtggtgcgtgtcgcgtcaagacggagactgttggcagaagataacacatctcgggccggcgaaggaacctggcaaactccgatgctggttatattgactctgggaatcaatatgttgaccctgggaaactcaaaagcatttctaggagctgtatatcccctgggaaatacaccttagctcctggggcttttaccaatctccaggaaaattaagatctacccctgggatctttgctctacgttcctgactgaatacacactggctctgggaacacattggttagatctgggacctgttgggctcctaggaccctacttctggatcctagagtcaatattttgctttttgaggtcgcggaacgctctcacaagacacccacaccagacctccgcacaaacctgagacattcgaccactcccagaaggcttagtcatagccccaggaaccgcacctgaggttccaggagtgggtgaagctgccaacaggaacatgactttaattcctcgaagtgggggtaaaaggccccagaagctacgtcgggcttcctggggtctatttgacccctaggagctgcttatatgctcccagaaaccgcactaaaggttccgggagcgagagaactcccagggccaagacatgcgttcccggggctgataaagctgccaacaggaacgtaactgattttgtgagtggggatggagagtgtacaagttacgcacgattttctggggccatatgattattgggctcacatgttccaaggtcaatttctgaagagtttacggcaatcaaggtagatggatgtttatgcagagcacatcgtcagccatcatctgtcttttacatcaagccactcagaatactgctccaatgttggccaatatcggccggctagtcaggtcaagcgacgaacatcctttgattccaattaggaaattcaacatctaagtcatctccgcaactcagaagtgtgtctattcctttccaacaccctatccgtcgcgcctctaatgtctatgggctccaccgtcattcttcgaaaatcatcatataatttagcaattgttcttgttcgtaatacctgctgaaccgttcttcataaccctactcctgtaggccgttggaaccttcacatttactgtgttgtaggctcggtgcgcgtactttgctagtgaccacgtaagtcgagtacgacacaacgcacaaacgacaaagtgaccagtaaatatcccggaagcggcctggccaatggatccataataaataagcttgtaatatgggatgtggtccctgtcaaggagctcaaaggatgcctgaaatacgtgaacgcggcaatccaagcccctaaggagagcacgatcatgctcacgacgatttaaatgcaaccgtagtaaaaccgagcggcgcatttctcttgtagccacttcggatagaccacgaggattaacccaaagatggaagatagggctgaaactagggccgcaatcactgtgccgtcgacgacgtcgtccatgagagtttggaatgtgatgtccaaaatagagtcgctcagtctcacgaggtcggatttgcacggtctcgcaggacgaccgccaagtgtacagtggacgaactgagactggcacgggccagccaggtgatggtaaggaaaaccatacgaggcgcattcgaatcatggcggtggcagtgctcgcaaggacgggtttattgagtgtaaagaattgaggcaggtgctgctcaagggaaaaaaaaaagtaaagagcgggaggtataaagatgaagaaggtcattatccccaggcactgtaaaacttatatgtgatcttcacgcaagtctgcctttccaaagaatgacccagctgatactgagctccgccacaggcgttttgattacctggtgccttagtggcagccaaaataggctttgactagataaaaaatgttccaagttgaagcactactcctatgcgtaaggcagatggcccccacagaagtgtctgatctctcagtacgggtcccgggaaatcacccgtttgttccttgtatttactttcctgatactatattattaacctccttaatatgtgtcgtgtttacgcgtgacatctttcaaatttgaacgtctgataccgacgtagtttgccttggtctgtttgcgatatatcactctgctgtactcgaggaaactgcggtttgctgttgattgcaagcctacccaatagtccccagaaagatgtagtcatctcttttctatcctcttttgttgagcttgtgcttaacagccagtgtaggatgcgcctctaagccatggcaaaccgtcgctgttaggtgaaccaacgcggccgattaggaaacgggcttcgagtgggaaacttaatcaagtcccaatattggcaaagaaacaatatggcttaggtggatatcttctacaggcggaaaactcacatgctcctggtgttcaacggtgttttatgttcaacgttgatgtgaacgttgattcaactttctgacatcattcaccacccgtatatcgcccaaggtgctggaatgagaacactcaaaaaatactatcaggtcggcacagtaccaacaaattatgacaaagaagttaaagtctccagagctcctggaagctcaaaacagaccctcggccggtcggatctttatcgtggcagcgcggcgcggctgaaccatcgccctctaacaacccccaagtcgtgagaaatgggactcccttccacacgccctatgagcaacaataatttggcagccatgttcctcctgggaatatgccctaaataaattggaggctcgagcatcatgtggatacagcaactggattaaaatatccttgattcgatcgtgcgtgtacgtaccactattgtggccatatattgacatccatagtcctcctaggagccggcgctgataataataacccgcaaaaccttgactgtgggtggtgggcatgactgcttcagccccaaatatttaaaaggttgtaattgtcctcacggttgatgatttcttgtctatcttttgctccaataagttgctagtacaacaccatcaccaacgaagccaattaatcatggatcacaacctatcacaggttccaaagaagtccaataccccagacacagaaggccataatggacgtatatgccaaactggtatagttattttagatccccttctcgaggaatccatcgactaatatacctatttcatgaaggcaatgaattggctgaaaacttccgtcgtgtcaatggtctatttatccacgggaatcgcagccatataagccaggttttacaaccgcctattggccaatctactggccctgtagctatagaggcagttacttccgttggtacctctcttagtagcttaagggcctctatgttatctctaagcgttataagggctaaaaactaagacctaccccttctgaacgtaaaaaagagagcagccgaatcctcaaccctcccacaaaagcgacgccgggattcgtactctacctctcaattaccgggccacctacaactggcgtatcaaaagagacccctatgccttataaaaattagtaggaaaatggtcaataatacacttcaatacctacaaatgctatccgaccgtatcttgatctacgataccatttcccctagggagtgggctactatgcatctcaccacccaattgctatagagcaggtacgaagagatcatcgtaaggaaagagatggaaacagacgctgtgcccgattttgatttaccactaacacagccagaagagaagtgccggaagtgtactgctgcagacgaggagcggctgtatgactgagacgcaccccgttatttttaccttatcggctatattttgatagtataaccggtcatttgaacttaaggagcaattatagtgttatataaccattaatcggtacttgagaacctgttgagctccaaatccatcagtatataactaagggacttttaggtacgaaggatttgaacggtttcctgtgcgatgttagtacgcttagtaagcagaaagaaatatgcaaaaccagctgtatcttgatctccaattaatacaatatattagagaaatcagatagcgcgtgcgaggccaatcggggatagcaatgaagaaatagcaattttgtaagttaaattgcctcgaatatcaaaatcagccacttcttatattattcaacccacttccttcgtaatagtgcaatggctccgtgccctacaagtatcgaaatatttgtgttattccgttaatcagctcttgactgctggtcctgataactcgacagtttggcagtcattttgagtctaaatgtcagcatattaatccaagtgactcaatatggcatcagttgtagactatattaaactgtagtattggtaagacaggtaattctagaacgccgaggcccaaatcagctgtgccagtattcgtccgagaattgtgagagagcgactcgccctactgaaaagcgagcttccaagccacaggcatacctagccataaataagtcgaccggattatctatcttcacctggccaacatggtcgttgcagcgtcaactagatgctggtcgcatggaagttgcgagtgatcattacatggccatgtaaatgaactctgtgcaacgcaataattactggcaagtttgccacttcatgggcctaccaattattgtaataaccataccatgtctgatccgatacgctcgttgactcaggagtgaaccatgaggccgccattacaaagaagctgccgcagactctgactcgcttgatagcttccgtctctttatttttggcgcgttggcggtcataggaaacctaaaatttgtccgtggacctcctgtatgaaccagcaacagacttgattatcaaagggcgcttttcttcctgctgctttgcagctgagtacccacatacccgattttgggcttgcctcgtacattctataagctgtatataccatgtcgagaggtgtcagcctgcatgctcactcaaattttgttatcgtggtatagttctgtgatttaacacgttgctggtgctgattgttggaaattgtgcggaaatgctgatatgatggggcctaatagcaacctatggcttaatacttactataactagcccgttccttatctataaaggatccctatacgatactctacgggtagtatgcccctaaacacggctagtaccctatacccggctagtacccgtccgaccacagacgcggagttgctcaaacccatggtttcggtttcgggaaagttggcggtgaagccagcgtgtgaacgactgcggtcccatggagtgtttctgtccaccgtggagtttctagttgggtcaattgatcaattgaccaccctcaaaatgacactggactgtggtgcaccagtcacttttgttcctgcgatcttgctatcttaggagccattttcatcattgcaaatgccaaggaggggtgtaccgtacgagcagagtgctgaagctgcctggataactcggttcaaattgacagaatatacagagtgataaataaaaacataaagcagggctagctactgctctggccaagaaagtggctgggaagtcagaagatatcatttggtaggaaaatgcggagggctggttaggtaaattatactttttattacgtgaaaggattatagtaataaacaggcagttaagtggtggcagggagagtggagtgtagatttgacgaaatgaatattctgcttagctgaggttcgaagtaaagattgtttgtagttactcgttaggcacaagatcacaattctctgaaataaataaactaaattgtgaggccagaccggttggctaaacttgaaatacgattagttgcatagaaatcaatcaactaggttgagtacccgggtcactgatgagcggctggcttagtgacttgaattcaagtcgtccatagtatcagggttacgtgataaaagaaaatatcaatgactcttgaaatcatcgacataatatctcggttgttagaaattttttctcatatgccatgcaaaatctggtagatcactttcttgaattgcaggcttaaacgcgacgacattttctttttgagacgattgaatacttgaccgcaggaatcgcgttcggtatatatattaccctgcctcttttcggaaaacgattaacccataattgaagagagcaaaccaaaatccattgcagatcgttgcccggcagatgtttagttcgacctgaatccacatttcctggcaagatttctcatgcataaggcgaggaggaaatcaataaccagcgccgatatgctggagagaaggtgtattaaacgagtctacagcataagccacaagagaaggatgaattactgagtctgaaacatatgtttagcggcatatgatagccgtcatcgtaacggacaatcaaatcaactactggaacgaccaatgtgacggcactgatttcccaaaaaacttgacttcgtgcagtgaaatttatattcgacagttagcaatggtgttgtgggattcgcaaggatgacatgatgggcatggggtgctcgagggttgtggagagagtcagttgggcggcaaacatcggtaccgatacatccgaaatagctgggaagaatgtgttttgtcaacctgaggattcggtgtatttactagcaatcgggtttctcttcaccgacaacgtacatcggaaattggctagtgttcggatttgaccaccatattacaccaaggcaggatctaaagctttcatggcagtaacagaatttttggaaagtttaaaacaggcgtggtgttcaacgggcccgaaaggggccgtatgaaatgccaagcacgtaatcagatcgtgcgatacttaaactcaaagaagcagaccaccaatgtataattatctgaggagaaagcacaatcgattgtaatatatttatcatattcttcggcccgttcattaaaattatacacaatcttcagatattgagttgcttctcttaatgaagtcctatggtagtagaactctagcggtaagagatgccgtaacccgcaatgtcaccaaagtggccaatggtgggtacacaatcacttgtctcgctttcgccgagcagctcctcgtgtaagggatccaattcagcccacgcgttggcatatttcatccccttgagcctttccttctcgatgacttgaccgatctcaatggccccattctcatttatattgttcatggtagcttcaacgcttctcggtcgaaggccctgatgttgggcgggaaggtatcccatctttctactttcgccaagtagacccgaagctctcagaagtcgttccggcgcgacggtcaatcttccctttttgaatacatatttggagaccgaagttgcaaaaataacgggtcgcgctggcttgtccctgctattctcactttcagccctggcgcaccctccagaaatgcttccggtagacaacgtatgagtgacaagatcaatttgtttgacgcttcctttctggacaaagtgtgtcacaatatagagccacttttggtcccatgtaaggatccgagaccatacttcgtactgctggaagattcgtatttccatcttgaagcttgtggtaacagatccgattatggcagccattatcccccgcctgccaccagcgacgagctcttggtcgacaagagaaactccacgacagcaaaggtatgacagaagatgagagcggcttgcatcaagatccgtaaaatatgtactattcgacttgtggaggttgtagtcggcttcaagaagtggtgtgtatgttgtcgttacacagggaagaaagactagcggcaagtttttgtctttgcaacgaattgatacgtgatggcttctcttctttgttaagaagttctggatgatggggcgaaagatgcgatactttaggaaggtcagttcagtcagaatttgtaggggcctggagagggaagactaaagattatgagcttgtcattagcctttcagtgaacacttacgtgaaatactagtggtaaagttttaagattgaccacaaggaagattgccaggaggaacttccaaagaccgaaggactgaatcgaactccaaagccattcaatcatcttggcgaatgtcatcagttctaaacgcatcgagcgaatttgtgatatttgagcagatctgagcagaaattggctttaagaggcaatgcaacgcagtcactgtgaatgtgttgtatgtgcactgtgctattgagaatcgattggaaagaagagaaaaagaaaaactccctcgtggaggtgacttatgattttatgatcgcataaaacgaatcatatatcgaatatgcgggttcatacggccgggaagccgaggcaaactcggcagtgatattgtcatcagttaattcttactgctaggattaagattaaggaattttgcccaattctcgaacgcattctcattggggcttgttagtaatacccgccacccagaaattggaacaccataattcttgaatacccatgtctttttggatatactgaaggatctgcggcagggcttgcaggctggtattgacaagatgcgtttcttctctttggacctgttcatgggtcgcatactggtttaaatcttggcgcagttccctttccactgttgcagaagcatgaggttgcggataggatactgacagaaatcaggtgtatggcgaacgtattggtaaattcacgatggtaaaattctctaactaactaaaaacaacaatggtccgtttttgacagtctggtcggacacaattagtaagcaatttgcatagtctaaaatcacatgattccatggtattggactcggtaatccatgtactcggtctgttttctgacagatactactgataacgcgtctaataattcaccgctggtagagagcctcaagggatctattcaggggcttgagctatcaagcaatatacctattttctggctccaactatttcagtatattaagctctacttttgtccgtcatcctttgcgacatagagtcgatgagcctgtcgacgtccatggtcttcagcgcttctgctaatgggaagcgggcgtatgatccgacattgttcctacggttctgggctcttgacagagcactccaaatgggatggtcgcgaggtagagtgtgcagtctcgcaatcgtgcgctgcgctcggtggcgaaggcgaaggtgcgtggggagtatataggcttcaacctctagggtcgcggttgctaccgtcctgaacgccgacaggattctgatcagcacgtttctctgaactgtgttcaagtgtcggatgtgaactttgtctctaagcgggtcatgctagaccgtcgatgcgtagtcaactataggcgcgacacatgcttggtagagctgtcgcatctgctctgggcgcaagtgtcgtagtccacttaaggcgattgtggtcttggtggcgcgcttgatagcctgctggacatgttccttccagcgaagtccctggtcgaacaccacccctagtgatttggctgtaggcgatggcttgacctcggtcccatcgaagatgattcgtccttccatatgctctcccctctttctggtgaggtggataagctcggttttctccgccgcgaagcaggatccagttctccgtgcccacttttcgatacgagggacatcctcggactgtatcttggttaaattttcttgaaccgagccccccactctccatcggaagtagtcgtcaatgaatgccgatgcacctccctgggagtcgacgggctggtcgaccaggtcggcgttaaagaatgcaaacaagatgggggaaagtggtgatccttgagctagcccagcattcaacagcagagcagtctcggtgcggaagtcgtcaaacccaatgctggcgtgccggtcgctcatgaagcttgcaatccattttctggccacaattgggatccgtcttgcctgcagcgacgcatccaggcttgtcttatttactccgttgaaggcgcctttaaggtcgaaggcaattagggtcaccaccttgtgcttgtaccaggctttgtcaatcgcactggacagcactagcagggcttgctcggtggtcctacccggccgtccgccgaactggctgtttggtagcaggccgtgtttttccgccagataggacaaccgtcgggccaacactgcctctaggagcttgccaagcgtgttaaggagtgagattgggcggtaggcaccaggttttgagtaatcaggcttgcctggttttcgtaggacgattatttttgcactcctccactgtctcggatggtgccctagctctacactcgctgtgaagatgctaacaataaaggccttgagatgcctccaaagcttcttccaaaccagcatcggtaaggtatcttccccgggcgctgtattccctttggctgctttcagtgatcgctcaatctctgattctgtgattgggtgccacgggagttccgtcgccggtgtggtaggtgggttgaactcgggtggactcatggcggggaagaacgcatccaggaatgccttcgctttctcttcgttttggatgcactcctccgagcccactcgcagtgctgggacgcaatcccatgtctctcggggcttcatgtacgtcgcagccttccagagcttcccttcaccagcttcgtcctggaattgcttccagtgtgaggacttggctttttcgatggtcctcgtccacgctcgtcgtttctgctgcatagcttcgaaggcagtcgtggtgttagcgtgctctcttcccagctcggcgcagtttgcctgccacctcctacgcagttggttgacttcgacttgttgggtcttaagatctggcgtgaaccatcgcttggagtatggcgtcgggcgtgtgtcgggtgtgaaccggtcgaccgcctgggccgtcaccgctgtaaggttttccactacccggtcgagtgttggccgggtcttgatctgcttccatgggttcatctgtcggactacttcctcgccgatcctagtccagtccgcgcgctcatacgccttccttgctttggtgtttggcctgctccggagttgaaggttccattctggataggtggcacggtggtcggatccatagttttcgtgatacagatagcatttgatgagcaagtccgggttatctgtcaccgtctggtcaatggtcgagttctgtctagagttgttgaatgcccagtaagtcgccgtccctcgagggagacaactgtggaggttgtgggcttggaagaaatcgatcaggtcgctggcgtcttcaatgaatctaggagcgatatagttgttgccccacattggatggtgtcggttgaaatcaccagaaacaataatactcgtcgcgcgctgctcattttgtgtggcgcttgtgatagagttttgtatcgccgtgagggctggtaatgctgacgagtcgttgcccttgaaaagtggtactggaggtatgtagaccgaaattaccagcgttgggagtcggctgtccagatcttaacggccgcgacatctgggtggtcgtatggtagttggcgatgtgatgaggtagaaattcttcgattgacatagagtaagctgcgaaatcgaacggcgtcagtctgggttgtaggtcgggataaatgccaggcgctgtggttgatatgcgttcggtaggtggtaatagatggttcctggatcagcagaacgtccaactctcggctctggggatcgttgatcagcgcctccatcctcggtcccgatttcatcatgttcaactgtaggatgcggaggtacttctctagcatctggtagggttggaggtcgatggtattgggcactctcgatcgcccgtagggtgttcaccactgcaatccagacaccgggctctcactccaggcgggcatcgctcccgctcgtgttgtcctgcacagtgtccgcatcgtggtgtttccttgtatgaccacgctagatgaccgaaacgttggcaccggaagcacctctttttcttgatctcgcggcgttccacgctaccgatatatctttgtccaacaaggagaccattgttgaggatgtattctgctccttctgcagagtcaaaccagataccaagcgacgcgaacttccccagaactttatctttccgcttaagccatgctaactcttcgatttggaagccttgttcggctaggtcgttttcttccataattgtttgaatggcttgagagttcgcattctctaggtcgaagttttcagtcggagtgcggtgcactacgacgccgaatcgcggtttgaccagctttgtattttttcctagctcattcagccattcagtgttgttgcgggctgcttcggccgaccctgggtccttgaagcgaactaagtatccagttttagtggtgccaatgccggcaacttgtgcatcttgtgttggaggtgcgcttaacagcgctgaacggatataggtgttagccgagtcggtagagaggtatcgcccgaaactgttccctcctctactctcattatctctcggatctaccgataatctctgtgtgctaatgcggacgcagttccggtccttttcgggtcgttggaggcttggttgcgggtcactggtaccgctggctgctatcgctgcccaagttctgggcgggtttggttgtgggctggtttcgatttgtgctcttagagccctgacttcttcatggagcctgtcgttctgctctcggaggacgttctggtcgtgcttgacctcttctaggtcggctttggtggattcgatgagcgtggtttggcgatggatgatatccttgaggttatcgatgagcttccacacctctctggtggtaatccggcctgtgccctcggcgggtgtataggcttcgccatttctcgttcttttccctatgatttggcctgcgtcgatcgatactcgaggttggaagtcttcaactgagaagctggcctgggtttcttgggtgtttgtgggagggggctcgggccctcccgctggtgggtccgccatcgttccggggttagctcccgctcggtacacaaccacaacagttttatatcggaaatgcgtccttatatacaggatcactcctattgttgctctatgcccccgatcgataccgtacggttacaggatcgactttctacaggatggatcgaaatcagtttcaccactttgctctcatagaatctttctcgaaccctatgacgaaacacgctaattcatttccgatttagcgtagtttcaaatattgaatcgtattgaaaggcgttatcacgtgttatattgttgactcatttgttcgtaagagtattacgaacaaatgagtcaacaatataacacgtgacctgttgctgtcttcgggtctgccatccacatgaaaaggaaaaggatcacccatatgcaattgtaccttttactaggtggaccatacaaaaggttcatatataaatgctgatttttcagtactacaaaagtctctaaaaacttattataacctatcatatataacaatctactctatttaaatactatattcaagttccagcctaggttttagggagcccactacgagcccacttaaagtattacactttgaaattttgacctactatcgcgcttaacataagatattcgactactaaggcgtccgggaaacttacccttacaatttagtaatagaatattagtgctgcacttacaataaaatgatattatataattaagtcgaaaaaaaacgagtatttatatatgtaccttttgtgtggtccgcctagtaaaaggtacagttgcatatgtatgggtggtccttttcccttttttcatatggatggcagaccctccgtgaggaaggtctgtaatttctgtaaaaaaaaatgtaagggccggttagtaccgagagcggttaaggctgagagattagggttgagtaaatcttcgagctaccaaaaccaggttgcaatgtaagattgaatgacttaaaatacattaaaggtaattccataatgcataaatacagtagatggaataatccaaatcaaatatctacatatgtacatccctaacggcctcggaggttcggccgatatcgcctccttcctcttttgggccttggctttttggtcattttctttgtgaggctccaacccataatggccgaacgctcaacccataagcaaggcaagacacttcagaattacgaataaaatgggcggggtaagcggatactggccaatagcgtaccctatatccgccacatagacagttgccaagttgaaactgagctaagaatgggatcgcatgggaacgggcgctcagggcgctcggggcgttcgtttaaggggctatgctcagccccgcccgggaaataaaaaagtaaagtgtttttgctatgaaatattccacatatcttttcttttgtttcccatttttcttccctggaatctcaagatggagacggcggatggtgaggtccctctacggcaacttccgagaagctcaaacaatcttcacgcacctgaatactccagacacgattcctcagccgagtctgacccgcgacatgatgaggagcttccatcatatacccaggtgcggtcaacaggacaaattctaggacgagggcacagtactttgcttcatcgatcggcttgggtatttgcattcacgatcatttacgtcgtactcgtcgtctacgcctgggccatgactgctgtactgtcaacccgacccttcaaagacaaatcctgggcgtactcgtttggaacctcccgctccagttattactatcgttataatgaagcagacttcgatcaagagagaaatatctatcgttctgtgcggactatccataccttcattcaacttgtcactcttccctggatttccacagtctgtgctagtgccgctgtaatctatgcgcagaaccaaaaggatcctatgggccttcggctacgccaagtcacaacgctggctgaccgcaggtggatggacttttctttctatccagccctgatttataaatggaggcaatacggtagcaagctactggccactgcgatcttcatctgtgtgtttggtctcatcacatttcccatccagtcggtctttctcagttcacagtctgtcaaagtccggactttgccccaggagattgccactatctatgacttcagcccgaatagtggttattcatcttcatcatacgataccggcaaagacgtgctgaaagtccgcaatgccctcaacaaagcgaatgtcgatttctaccaacctaacttgtggagtaacaacagtggagtacaattcttgactctcaacgatctgtcttctcagacgtactactcccaggttccgagtggtttcaacacaggattacttcgtcagtttgctccacgtgtgaactccacagctacatatgagatcgtaagagcgtctgatttcccggtcgactgcagttcacgcccaggggcattttatgccgagtattcatcttcatacccgcagtacgttaattctacttcaagttattcttggggtgtcactgcatgcatgccaggaaatatgacgagatctccttggcagctggcacgtaaggcacgtaaccggcaggatttctctgaggttctctatctcaacatgacacaagaagattacagaacaagagatcatcaaactctttttcagatcactgtcaacaccacggctggcttctttgaattacccaactatatgaacaagggtgtacccggccccttactggatcaagatccagcggaactttgtgatcagcactgtccatcccaattcaacacatactattcggggtaccgccgtgacgggatcacagtggaaggcgctctcaaagccggatcgcttggtcccatctcaacagacaacaaaggaccgttgttatcggccgcgctggcaagcttcggccctggctctttcatcgactcattcattgcaaccgccgcaaccgttaaagcagacgacaaagttacagacgaggtgtcatcaagcctgggaaaagtatgcgctgcgaacaccccactcaccaacctcatggggtcttcctctctggagtgcgtatctgttgtgatcgatagttatggcgactattattaccctgttgggtcatacattgcgcaatggataaattacttccaagacaacgcggagccagttcagaaggccttcacatcagcggctttccttgccaatcaggaattcctttccagtcagaggggcagattttctgttgcccaagatttgggcgccgatatggatcttccatcaatttctcccgtgggaattatcgtagtctccatcttgatggcactttacttgctacctctgttggcgttgtcactctacgcgggtttttcctatcgatggaccgaaagattggattcctttgtgatgctgcgatttggagcctttgttggtgataagttctttcctttgctcattggtcgcgagagtgataaagttcctgagctggacgagatgcctggtgttattcgggatgtggcaacatactcaggcgacgaggttattaagattgggaggttggggttcggcgaaggcagcaggttgcgagaaggccatcggtacgagtgcttccaaggaaacgacgagccattgaatcattacgaatctcgacggatgcaacgggttattcaccgccgagcctaacaattgatatacgtatatgtactgggctagaaggaaccctcggtcatttctaatgatttgatttgatctaataataatgttcatatacgcaaataatctcgatgcttccaaggctatttcatgactcattagaccttatagtaggtacttatataactagtagccccttcacccttcaccgggatttcccccataaagcgcctgatttttcaaaatactaggatttattttatgaccagcctggcagcttggacaaactttattctggaaatgttcctcgttatgggtatagtattcgcatctttatcacgaattatgagatttatattgttccccgaggtctggatattattaaaatacaggaaggaattgggaaggagtcatcggaatctatcatatagttggtcctgggtaaccgagctgctgagggaggttcgagtaaatatgtacagtgtaagagtgtacggagtatcctgtgacactgtggctttttcatagacaaatttggaataattggtaatgtagttgacagtaacatatgttttaattctcaggaccctcacgcatctaatgtatctgttgatgtgggaatttgtcactgcatacctagctataggcgcgatcgaggttcagggatctaccaattccataaagactacgtaataaagaggactagataatatttgctagacatgggtaaagacagtgagatgtgtaaagaaaaacagacatggcaagagtcaggtcttctttgttttcctcggctctccaagttccacgctttctcaccctatgtataccatcacgccgcaatctattttgggcactcacttcagtggatacaggggttcgagacaaatggagttagctgatgtctttcgtggcttcaacgtgacccaagtgaagactctgaacctttggagttgaatccataagtctttgtttgacaaagccagcattaaagcccatttccatccggtacagcggaggagggttgtttgcccagacagagccccaacaagcatcacaagtcgtgtcaaagatcaaaggaataagccaaaagcgtattgaaggaatcctcgaagtcagatccactgagagtacgcctttgcaagaactcgccgaatgaggcgtttcaagagctatgttgaatgaacagcatgaaaaggagattagaccttcatccaagagaatgctctgtcatctttgtttcatcttgtctacggccttcaagctttcttcgacctcccataatcgaggcttccgtccggtgagatgggttcggcgtatacaaaatgctaaggatacaaataccttcgaggttctctcctttatatttatcattcatacattctcaatatttgatttgctagttacctagagaaagaaccaccttgctcgtgactatcttctctgttgcaagatgcctccacggccttttttccctcgcgccgcaaaacctggcagtaaagatgcatccaagaagaccgatggaaaacgcaaggcagatagcttgacgacccgggattttaacctggtccgcgatgtcccggaaactttgttcaaatcgggcttcattactcgcatggacccagaaaacccatgttgtcggcgatttggatcggacttggtaggagtattcgatcgcaagttgcgattttcttcgagttgtcagcaatagaccacgtaagaaccgcaatacccttacccaacaccgccgaggccaatcagcgctatcctcgaccccgcgaccgagttcttaccgtagatctgatcaagcagtgtctcgcgacggacaaaatctggaccacgcgtgaatggcacagttgacaaagggctgggcggagtttctggcggctctagagggaagcggcaattagtcagtcggtcttgaccttgtttggttccgttcctgacttacccggtggcaggtgaaaaagtgccgtaaatgtgccataattgattcccacctgggctccatggttgacaccagagtgacttgtcgacgccatggccgtataaatttgcctgtctgtagttcattacaagctcttctctggctctcaactgcaggaggggtacgtcatcaggtgactcggctccgcggcgctaagacaggagaccagatttgcaggccacccacgtcgaaccgtggggcaggactagcaccttcccaggaaccggatcgacccgagccagaacactacagctcaagcgcagcacgcgataatcagaccggtacatacccgcggggtgaaaagcatgctttgacagtatgacgtcgagagcttattgctgccggctttatcaagtacacgatggatactttgagatcgcattttgttgttgctatggtgaaactaacgtatggttttccagccaagcaaccacttttttgaggtccgcagcttgagatgggcccccgagctcccaggaactgcgagatcgcccatgtcacgtgcgtttcccaagagccagcatcccccagacttttcacccaaattcattttacccgctcactgagcagaggtggtgcaagggtgagcagatggagttccctatcccccctccggcggtcgaccactgagtctgccaaagctctcctatatcaacgtccagacttttcttcgcaatatggcgccaagactccctctctcaaagctcgaaatgacccagcacatgatattgagcaaatcattgagtgcctcgcaaatgactaaagctgctgaatatagtaagcgttccatcatcaacatcagcaacaacctccgccagtttggaaatgtcggagcacccgcaactcgagtcggtcgacgacgaagcataactcctccgatgatagaagcactgtgtgatcgcctcctcgaaaagcccgggctatatgtggacgagaggacaatctttttatgggacgagttccgtgtccaggtcacaaattcgagcctcaaacgggctctcgcttcggtgggctggtcgaagaatgtgactcgacagagagcaaaggaacaaaatgcggatctacgagacttttatatacacaacctgtcggactttcagtcgcatcacttggtctatttggatgagtctggatgcgataaacggattgggttcagacggacaggttggtctcctttaggtacggcaccattacaggtagccaacttccatcgggaccagtggtaccagatattgcgtgcatattgccaagatggaatagtgctctctcgtatatttcagggctccacggattccgcagtcttcgaggacttcattggtcagcttcttaggcattgcggaagatggcctgagccaaagtccgtcctagtcatagacaatgcatctttccatcattctgatcgtatcgaggaactgtgtactaaagcaggagtaaagctagtatatcttgatggcggcaacgagaacagggacagagaaagactgtattcgctatctgacagatgactgggggaggaagaaggaagagaggaagacagacagagagagagctggagacaaacaaacagacaggcatgactagcctgaacaaacaggcagccagccaggtcacatgacccaggctccaacactatagctcctgtcagggatatacatgaagtatataggacggatggagttatgggctatgcgagacccacatggcgtatgtgggttcccctgaacgcgaggaagctaccttttttgcttcctcacgctacgtcttgtatctagagtcgactatatctttctttaattagtcattactcatctgaacaccttgtcttacacatggatggatctaatataaacaatctaaaaggcaaggttatatgaaccaaccagcagagaacccaattaaatatgcactagtaataaaggaaatcaaccatatatctgcctgcagagcacatgtccagcgcaactacctaatgctcatatattacttggctaccgaacattttgcatcacatgctctaacaggcccttgtaacaaaaaaaaaagatattatacaggggctagttaactactactcactgggatcgctagtttgccttgctagttaggcgcaataatgtaacttttttccaatcgcttgacatgtgtagacatcccttggaactgcatagactcaccacacacccaaattcgatgggcctctataatctatatcatttgctacagctacatgttatatgaggaatgctagacctcgctgtatatcagtgcgtaattttcggatgagttgcacatcgtatattagttatatcagggtaacttaacaagatgatgtagcaagaacatcatgcgtgaatgaacattcgccattgtggaaccatcgaatatagaaagcatcagagcaaagctgcgactgctgcagcaaccacgggagcagctgtgatcaatgaaccggcaggtccagcggctgcagctccaggtgtttcggtcgccgcgggggccgtaaacgacttcactcccccagtgacgtccatcttgtagtagctgctggctgccgtcgaagaagtcgccgaagatgaggacgaagaggcggtactacctcctcttacggttccacccatgctagcgctcatggtgcagctggcagattcggaccaggatttgaaagagcagtcatacgtttcggtaacggtaacatcgtaaccgtctgtgcctggattggtggcgacgtattgtgcagcgaagttcacggtctcgggaccttgggtaatcgtccacgaagtgacaatgtcgcagtctgatttggcgacgtcatccatacaaccgacatggtatgtggtggcttcggcattgataccagcaacgctggcagcatagctagtcacgccggggaggtcattgtcccacgtgggggagaagattccaatggtggtgcgggtgctagattccttggctcgagcacccagtgatgcgaggaacgcagcggcaaagatagaggtacgcatactgatagggtttttcaaatatttagggtgaagtttagcagagaggcgagtcgactaaaagttctaacatccggggcaaaccgttcgctttaaataaagacaaaccaagctactgtgaaacttcgcttatcgagcaattttggacgactgagctatgttagcgtagacctagagggtactagtgaagtgtgctagtctgggctattttcatcattcacccattggaccctgaaacgttggactggacgagaataggactggcgttcgactaccttgctagcgttacaaccgagtagcaaagcacttcaattttgggggacggaccccgctgaataatacatcacgggggccctgttacgatgtataattaccgtgtagaattccgaaaggattagataaatgcgaatacaaatacaggaacaattttattcgcgcgaattgttgagatgaaatgattgtattgggtggagttgactcattttctaggtgggactcattcattacatatctcttggtagtagtccccgccataagctctagcgggtctgaattagtcatcgcacagtgaaagaagatcatttggatccgattgtgggccaatgaaggtcgggtattgggtctaaaaaggcttacgtagtctgagtgctcactgggcactccgggcacagaaggaaattattttgcctttgtggtaagggagagtggcagcggggatgtccgtaagattaagccaaggaacggtggagcgctagtgggcaaatatgggtgtcgtgggttttcgtgtgagacataacgcgggtatccccgattttcaccttttccaatctttttgttaattcttttcttattttcccttgcttttccacaaatctttggactcgattttgcctcgggtgacctttggccttggaaactgtgccaaggataagccctggcccctgaaaagtcacctgtttatataatttgaagtgctcttcttttctatctccgttttcatttccatttccccatcttgaatattctaaatactcaaatatgtacacattcaataataggctgtacctggggtcccttttggccttgcaggcctgcaccaaggtcataggcgcctcagctacatcgggtgtcctcgaagtcgacttggtcttcccacgcaatgagacatatgcgccctctgcacaaatgcccgttgtgtttgcaattcagaacccgcatctggttgcgccgcttaacatgaaggtttcttacatcataacgcctccccgcaattacagtaacatcagcgagccagccctattcaatatgaactcgaccagtctcttcagcagcgatccttacttcctctataacaacactgactttgtcaacctcgagggcacgtgggaactcacatggttcgtggaatacggacgttgcaccgggtccagcggggatattatgttttaccccagcaattccacgattgatagtatcatcttcaccaccaagagtggtgccgcgaagccggacctcattgctgctggcaagaaagatacttgcgctacaggtattgcagcctggaatgttaccggggcaatggatgtggaaggcgccgattggggcggctatgacacctgcgcggtcgtttcgaagagatcaccatgggctactgtggacccttgcgcagccaagttcgactctgctattgcttcgaatatctcggctgccttgaatgccactgcgggtgacaaagtctctgcagatgagaaaaattctaaagatgagaatgattctaaagagaaagatcctgcagctgataatgcgggcgctgtgcatctgccggggggtggtgtgacattgttgacagcaattttcgctgggctcacttacatctttgcataatcgtctcttttcattgattcgacattcaattctctgatcacacatgtatatattgtatttggttagagatcttggccaaaggaggcatttgtatcacagtttgaataaataaattctattcgcagtcacaggcaactacagcgtaagaacaaaaaagtaaataaatgagcgcattgtcgtttccatggcttggggcgcagctagttgggcattacgagatattcacttgcacgcgagacatagagccgcaaaacacagggaccccggaaggttgtttagtgaagaccaagcactcaaggtccggggctggtaggcctcggcttcgcggcgcgaccattcacggtggcgctcgaacgcctggacctccacttcgaggcgcgcttcaatggtccgctgcctcaccgtcccgttgaggtggggctccaccaaggggtggatatccgccgtaatgggtttggcgtacttgaatagacaatcgggacgctgaaggtcgcccgacactacatcccagacctgccttgctttgagataggaggtcatgagacgtttccaggttgcgaagttgtcgcttcctgtcagaggctcgatggccgtgactgctcggtcaggcgagtcatggaccagagcagacatagtgaggatagagaaagcggggtagatatataatcaagatcaagattgacaagatgattctcagatgagtagagacggcacccgagattttgctcccgggctcataacctgttgttgttcagaggtatgaattgattgtttattctagagggagagatgaggttatatatacaacacggagccaagttgattgtaaatcaacttggttgtctgtatagacatttcggagctaattccgatggtgcggcttgcttcctgatctgcaccagcctcatatcacaacagaaaccttgggtcaaaggcaacttcgataattctaaactggaagataaatgctcaaaatggaggaagaaatttccgtacaatcacagggtgtcttgagggctctttcacggttcgtgaatgtattccactgtcatctaggaagtgttacagcgtcactaggcttatagattgctaggtgtcaaaaatctggcgaattcaaagatccgacccttgtctgcgagggagaaaggatcaacgtatataaagttgtggtttgctctcaatcgggcgtacttcatgttgcctgtactggcaactccaaggttagtaatttactatagcactaccaatgaggagctaagattcgtctaggaggcgtcatccggcgtctatgagtttttggacgactcaaaaattattgttgggaagccagtaagcttcttttacatcccaaaatgcataaaatatcccaggtcacgggctcccaattgtttgacctgtttgtcaaaccgcgggtgacccgcgcttaaccacatgcggtttctggcagcggcataaccaaccgcagttaggagaatccctaccctcaaccgcggttgctgccgagctctaacgacaagagcaaaggacggggagctgtcacgcaaaaggaaaaagacagctttgcgcctgaaggctgtagtgccagattcgacctaacttctcctgattccccagcgactatcgactcttctgcttgtcacagggactaattaccattaaaaaattgttggccgcggcgcatcttgcttgactcaatttcagattccaaaattacaacgagtaaggaaattaggtttccggagcatctaccgccgggcaatctccgttacgacgcactcaatcacagattacatagagcagagaaatatactccgcccatagggatctacggttgaatgattttgataatgcaacgcactattcgctacctgatgccgttccagcataatgcggcacctgacaggccgtgacagatcagttgttttcagccgaggaagtaccgccgctggcttggggttccgggctttcaatggctattccccttatcctcagatggcctcttagttttaccccgaagactgggggctcccaagcacgcatgcaaactgaagttgagaagatgtttttgccgctgtgcttagtgatatagatatgaagaataagagtttttattatttgtcaggaatgtctgccttaactcgtacagttctgccggtcatttattaactatataccttcggtaacaaattctgcccagagtagactatattgtcttcatactgcttttttcccacgtcgtgaggcacacctacaggccttgctcaatcaacccatcttcataaagttgcagtatcatacgtattgcctcctaatactcatgtgaagataattgaagtgttcaggtgatgacgacaacagtcggctttggtcagattattgacgaattggatactaatgtaaatacagtgaaaagggaataaagagtgctgcgaaacttgactcgttggaagccaacctggtgctagtaatcggaaatttgtgtcgctcgatgcgaaattccagcttgctcgctgcatcagagcgatgagttgccagtgggttttccagcctgagggatgaaatgactgctgccagctacgttctcacggcgatggttatccggatctgattcaaccctctggtcaggcttatccgctgcacggttgcggattcctgtaggctttccagcctgaggcatgaaaggggtgctggcagcgacattctcgcgatgactgttatcctgatctgaactcactctggggtccagcatgttggcaattccattattgtgaagaccacctttgccataattgtgtgcatatcctagatgagcatctgggacgttctggcttcctgataatttagttagatctgataagtgtatacaataactgaaagaagcaaagaggtgaactgtaccgctgttgactcgagggtcgagtttattagcaagcttggagcggtaaggtccgccgttgctcgactgatccgacataatgaagtgtggtgtcccgcagtggttatcagcactggattaagtaactttgctcctcccctgagcggcattatatttgtcttcattggccgattacgtaggggtgacatcagcaaactcacagaaaaaccatcgggtcgccagcttagtcatgcaaaactaaatccaccaaattcgtagattattggcccctatcgggttttgctagctcaggaataatttttccattgtatttctactgttggaccatacttcagactgattcggccatagccccaggaaccgcacttgaggttccaggagttgatgaagctccaccaataaggttgagtgacgtcattgctctggctcggtccccaagaacgagttaagcacctcttctttctgttgcccacacttattgcccgtatttcaatttgtattcgtaatattgattacacattccagagcccacattttaggtcgtgagacccctcacgttcctgggatcatatccgaccccaggaccatggcatggctcccaggtacgtggaagctttattagagttcctcaaaagctttatggtccggggatggatgtgacggtctcacgtatacatagaggtggatagtgtttcaagatgaataatcaatgttaagaacaactatagttgactctagatacaagacgtagcgcgaggaagcaaaagaaaggtagcttcctcgcgttcagggccatatacaccatgtgggtcccgcgtagatcatatctctatccgttccgtatgcttcatgtatatccctgacagcaatcaatagcgtgcctgggagcatgaaatctgggatcagttattatctggcgctgatttagacctccctgaattttagatcaagtgcccaatagcggagcagagtggggccgagatgaccaaagtcgtcatagtagatatattccaggaaacctgctgctctcagaccgcgtctgcggatttgtggtaagtacctgatcgtcagattgggtggctgagctgagatctgcggggttcatgaatgtaacttgacgtttactgtttgcattctaaccacgctatcacactacctgaaatttcgtggtaatggcactgcacctcggcacaccacatgatatctgcagtccaagggtcatgaaattcaattttcatagcaaaatcgccattattgctatatagcgagtattggccgtcggtgtagccaaggtagctgacgaaataatgtcaggtccatttgacctttcttagaagttgaaatctcaaggcctcaccactgtctattgatgcgggcaacccaaatatattaactggttatactatgaacataatgtaactatctaatcaataaaatatttgcacaataaaaagatgctcggcatctactaagtgttgtgaggccccagatcctactcctgtagggtggttccaaggtttagatctctctgtgtgtgggtgtgtctccagactgtctccacattggtcaacccgtgggtagttttgatgagtctcaatactaaaattatttatgcatctcgtcacaggctcgattcatactatgtccatgtgctgtcggttgatccatcacgttgattaaatatatcactgagacctcaggacttcaggtctaattttataagctgtacaatcacatcgccctcctctgctagactaaatcatacataggcttcaatccaagggggccattcagtttgttctgactctccgccaaccaagttgccccgtggtgaaagcacactgcgagattgagccatgagtctcatttggtacaatcgccacatgtcccaaagaggtataccaagtcgtcgaaatgctttgaaatccactttccagagagcgtgataactacggcctttttcaccgccacgaagggcattgaaagaaccaagcacggcatttctgcccttcgcaaatctcggactccgacgccatgtcgaatcaacttgtgtattttgaatatttggcagaggccagcatgtctgtaccgccaaatcggttggtggcggaatggtaactaaatatgaagcccgatagctgagaattgttggtttggaggaacatagatcgacgacgcactccgaaattgtctggagctcttctattccccccggattccgacaccactctatatattgttcaatgaagccgtccagatcacaggtataccatagccaatggtttattgcagcattatagatctgatggaagagctcaagtttccagagacctcgatgcgtccgataagtctcgatccatgatggtagatcaatatcgaattggataagctcgccaccttttggtggtggaagtattctattcacccaatctataacattggcatcggaagccataggacggcggggctctgcggactcgagacgactaatgaaacgctgaagacaagcacaggcagtgagatgtattttcgctgctgtatttacagtccgatggaccgcgcctagtgagtgggtggtggaaagggaaataggtcgtataacatccgctggtgagctagcgagctcttctagcagggcttgcggagtgaatgatgtcgatagaatagaggctaggagcgtgaaatagtaatgaagtccgtgcgaggtgagggagcaatttctcaggacgttttcggtgatgtttttgaaccagccgttgaaagcttccttcactctgggagatataggcgcttactcgatatcaagagtaagattgaagttataaagggtacttttgagtggcgctgtatagatgacaaagattacgtatcccttctccatgaggacacatcccaacccccttccatttctccccgctccccaccactgcccacctctgcaagtcatttaatctatttaggtttattatgtatttgtgttatttcaaaatccaagcattctggttttttctcttcccccctatcttcctacccactaccatccagagggtgcatctcatccatctttgctaaccttcctgcgtaatatcaagatggggtggagcaaggatcattgccctcggcatgtagcacttctagctgactctctccttcatttcttcttgctccttctcttgtctttttttacaaaaccctcatacgtgcataatttaactgatagaatgctcagatggcttgcaaacacgctatttaccaaacagtagcccatatgcgtatccctcataatgaacacgaccggaatagaccgcccggccttcaatccctccagccaccgagcccagtgctcgtgcatacacaatctcgtggtgcacaattgcctgctttgtcaaattaatcgcgaagacttgcccacccccaagaataaaccgggccgtcagcccaggggattccatgatcccaccagtgggcggataggttgcattagatctcactcggcgcaccttcacggcaaaatgcagcaagaccaactcttaattgactccagccacctctccaaggcggacctttgtcacacccacctgtccgatccattcctcagtgggcagctgtacaaccgaggtgtctggatatatgaactggccgtagacacgtcccatggacgtggagttcaagtaccattttacagagaaaggcgtgcctcgacccagaacgaagaggagcagagagatcacagtcgccagcaaggtcaacaacaatacaatgaaagcggggatgccataagcccaccggtagtggatcctgcgattgaactttcgaacaaatgttccgcccgcgttctcgtcatcagcgctgtttgcactggctgcttgagtatgccagcctctggtgccggtgacagcgttggctgcaacattcgtccagacaaggttcaggattttcgcactgccctcggcatccttggacaggtcctgccaacgagagaaaatgcccaaatcttcatcacctgaataggtaacagcaagactactggcctggatcccgtacgacatactcatggcatgcacgtggaagtcaactccgggaagattctgcaaattcgaataagggctcgcatcatgcctttggtaccccggtagatgcagccactcccgctggaaagaaacgaggtctggtcgattccgatccgaaggttggataaagccccaaattgggttcgcctcctgttcaggtagacctgtgatttccacgctccaccatggtttgctctcgtagtctttagcttcgatttgtgcaactgagaggccggcgagctggcctgttccattatatgtgaagtcgacagtcttgacaattgcccttgttgcggatgcacaggtgtaaatgggcatcataagcctatcgcctggaaggaagaggattgcttctgttccatcacgtttgctaggggctccaaacaacattccacaactgatggcgacactgcttctgttcgccactactcttccattcgttcctttgcactgggtcactgttcagcttagttagtactcgtctcatattcttccagtgatgctaagatacgcacgggctagatcaaagtcattctggctgatattgaacgggttggtgtagttcgacactagggagcctgtggtgttgactaatgatggcacggtgccattgaagagtcttctaggtaacgagccaaaatacctgccgaactcgggccatgtatgtatcctgtctcgctgtccatattgattcgtaaactcctcatggagaggaaagtttttccctatctccgagtcaagataatttgtagtgttaggaaggggattcgtcacattcaagaatgccatcgtgtaaacgttgttggcccatgctgctcgatatgctcgactgtgcaggtcgatggcatttgccggagagatatcattatcgaccatgggttcaccggtatgtagattcacaaaaccaccccggtcaacaagcgccaaattttccacctcgtcactgaagacggagctaaacagaggttctttcgcgtcaaattcaagggtgaggttagtattgacacaggcagtctccggttccagaaacaagatatcttctgaccaagcgctaccatggacatgtggcgatggagttgaatggtttcgcaatccaattcctccactcttggtgtcgacaataagcccctcgactacatctattgcgccattcaagagtaaactctgaatttgacgatatgcgccgatcaagaaccgtggcccatcatcattcaaagtgctgctggagtatgttctccattggatgtcgaataagctcgagacactctcgtcaaagtcactgaggccccctgtgaatgtctcaacgactttcgctggcaatgtataatcgtaattctcgagctcatcccacggagtgaagttcgagggaagggttgtattcgaacctctgcatcgaagaggcgctgacagtccacacaaacgattcaaacccaatacactgcggcctggtgtgccataacccatgggacctgcatccttggcataatgaaagacgtcgtgtgttccagagctatcaagactgatagcgtcgtacaggccaataggtgtgactatggcagcaatgcccactaatcctaagatcagagaggccttgaccagatgacagcaaggactggcctgtgaacgctccgtgacgcaaccgagtcgcttcccaagatgttaggccaataggaggagtggaggaaccggctcacaaccgacctgtcgatgcattagcagttcttttattccgcgtgagaatgttggggagataccatgttgtgaggttgttctccggcttcaggataccggtcaacaatgcccccagtatgacaggaagaagcagttgaactaaggaggcataaaaagcagttatgcatagatcccttctggcatatctcatacaacacaccacttaccgacaaaaaccagggcagcaataataccggccacctggctgacagtgagctccaccatagagtatgatactatgcctaagcagcataaatctcgtcacggttcgaagaagctgggctggtatgagcccagtaatccggggttctgcaaaaaaaaaaaaaaaaggacgctgatcttccattctagtcatatagatgattcctttaataaaggcatgagtggcaggctgtgctgcggctcttgggttgctgggcaatcaatattgcaaatacgaggccaagaacgaacatatatcagcaggtgcgactatgaacatcgtgatggccttgtggcgttgccgagccgccattgtcttggccatatatagcgtgcatcttttgccaagggctaagtaagaaagagagaaataattgcgttgaaggcttctcttgctggcacaaacagccccatggtggttgaatttgggaaaattcctgatttaaaccctttgaattgaggtgagtctctcatacaggcatgaagctattctgtagattcttctctctgtgctgattgtaaaagtaatgagcaagcaagataggggcaggcttactttttaccgcacttgggccgtttaggttagatgttcaacattcggtaccaatggatgaccagcccaactattgctctaacagctacaggaggacaagcatcttggcaagctgggaagacttcccgcccgtatgcgctggaggaggctttgggctcacattaaagctcttggctcattggcttaatggtagcagtgagttccgagccaatttaagtaacctcgagtttagtttcgaggatggagtgaaatatctctgtttgctggaatggtctattgcgtcgttgggaggtgtgcaggagagatactgagataggaaagagataaagagggggaaagagtggccaaggacggaaggcaatttttcagcctaacagtgattgccaaaaatggcagtatccacgtcaatcatctcctatgcactattggtccactgcaggcgcccgccccgcacaatcttctgtgacactagtgacatacatagtgctcgcccatattctcgcgggcacctgcaatcccctgaattatgatgtgcgactaattcactctcagtagcgcccgttgagcgtttcatgtgttggccgtgaattatgcttacctgccactgaaggtgtctttggctctcttaacaccatgacgtttatatgaacggcttgaattaacagtgtgctgatcgaatcttaaaccgtccaggcgttgatgaagaaggatggagatggcagggctgtcgtgcatgcggtatataccatcattgtattccccttacccctacgaagcgtttctaatttatgattggctcgcggctactcctttctccatcttggagtagggtcggactacggggagaagaaagaactcggtaatcctactggctgtcccgcctatttacagccctgtcgacgaaagtggccggatacggttagcgtatctcttactcttgttgagagtgccactagaccgaaattagcaacacttcactccgtgtgtttcgagcaccttcatcacttcttgacctgaatgccagtgtcaattttctcccgcgaacgaactacaggatggatcgaaatcagtttcaccacttacacacatagattctttcttgaatcctcattcaaacaatgctatgcctattacagttactctacccctgactcattttctcggcggtactccaatacagtcgtaaataacaatataaaaatagcttccgtatcacgcttgtatatctttcgagggttctagaatgtcgaaacaatgcccctcactcttggaaatattgcacaggatggatcgaaatcggtttcaccatttcctcacagacattgtttctgtaaccttctttcgaagcactcaataccagtttctagaaagccctcaaacaggtgaattgaagaagtttaggtatctatgaattgtgaaatctatatctgcttacacaggctgcacccacgttcccctcatcccgtatgagcgcgagaatcagcttcagccccgagtcacttagtaggagtgttttgttcacttttgctttatttttccttcatccttctcagtgatcccatactcccttatttaaaataataccggaaaaaccgagaatttaatgaacagtgcagctattggcatagtgaacccaattttagtattgtaacggttgtacaacggaattcccgcattaaggatctcccagatggcaacccacgggttgggttttggcgaggcctacctaagaacgccagggtataggatgttgttcgtgacttgatgacagatggattggttggttctcggtggcccatcagtaagttgcggccccataatcgattggtatctggtatgtccgtaacagagaggaggtggaggagaagaatggcgggggtctgacctagaggcttgcgtataaaaaaaagaagagggggaaagagggcggggtaaaggtttgtgtcatcatggccgctctgtctgcctcaaaataggcactgatcttgttcttgttgacattgttgatgcctgttgcttcatctctttcttcccctatatcatgacccattcgcccttctttgccccctaatttcctggccccgaattctccacgtcctacaaccccgcagcgcctacttctttcccgtcaaggtggccagcactcttgtcactgtaaatggcccaacgtgaacattacttcgctcgcacatcaagaccctaagatgcccgtcacactgaagacttccgacaaagaacctgtggcctggacaggctggagatgtgaaaatgccgagaatttccttaaagatgcatgcaagaccgaatactatcgctgcaagcagattctccaaagttccatcactagactccccgacgcctctcaaactcacatcagccccagcactcacggctttgtgcgagcagtatggcatgcttattcagaccaccacaatctgatcttgcgaccggaggacgtgtggttttccatcctagtccagcttagcttctacatccaggcccactcggaggaactgcgagagcatttcgtcgagcatgagggccagaagcaccttaaagtaattgaagctggaaccatcggatctgtggatgtgggccagctggcagtgcagttgaccgggctcattcagcagaacgtggtagacccggagcttcgcgattggatcatgccctctttcagtactactaccacgacggacgagattgtcgccgccgtgattatgatgggaacgatgcaaaaatacttctcctatgagatggagatgacgtgcggtattccgtcggtgactttgctcggtgagaaagacgactgggaacagcttcaaggcagaatcgacaagatttcgacgctcggcgaagagccgacccactttgcatctcttctgaaaccggttctagagaaatttgtcgcctctttcgacgactccccttcccctgacgtaacggacttctggaaccagtgtgtccattttgaatcgatgggaagtggtcctaactacctttcaggatgggtcacggctttctgcttttgggacacagacggaaagagactttatggaccccagggcctagaatgggcggagaatacatatccccggattaacacgtccgatataccaattggatgcgtcagtgtgcccgtcaaggtgaacgataatggttgtgagctcaagacctcgatggtcgctggcatggttggtatcgaggcaaagtccggagcgaacgctctagtatttgatggacaactggttaaaaattctatccagccgttctcgggatggtggatgtttgaggaattgagtgagacggcacttacagaaaagaaagagaaggaacgtctgagggaagaggctttctacgaggaaattagaaagagattggaaccctaaagggccttgcggcaatgactaagaaggtgaaggaatgaagagtgaaatcatgaatgattgctaggctcaggaatgaccagaggcttgggataaatttcctttactactctgtatcatacctgattaggttccgttcatgctcgataatcgggtacttcttaagatggtacggaattctacagtagataggctcatgctttgaaggagccaggcatgggactatcttggttcaactactcataattgattgctaagagacccctcctcgggaggctgtttggaggtagagcatagaggtgtcgaatgtagtattcacaagcgaatatggatgtattcacgaaagaagcaataacttacacatcctactgacaggggtactccggaagaacccccaatatagagcgcgttttggcgttggagcctcgagaatcaatcgaagagggtaggtggttgcatcagtttcggggcgcactgtatagccattggagtttcggaacatactgtagcttccaccgacgtctgtaccaatttccacaattgaggaagacacatcgcggtagagatgtcaataggcagtgaaacgtaaccgcgtgttgaccctaaggtgaaaaactagtgtctaagtacgtgaagatgactggtatttggccttaagtgagaaggttcctatttcggcatggtcttggtaagcatttcctttttcctttcatgcgtcctgccaactaaagctgttatcaaactagtatagcttgatgtggtgactctaggaaggcagagatccaatacgacagacagttgagctctagcaaattcatggtcgctttctgcagaaggcaacatagtgcggacaatagaaaaagaggaaaaataataatgaagaaaaacgtagaacacgaaaaccaaagatatgcacgtaaaaccatcaaatatgtcgctgcaaatagttgctgcaaattcaacacgtgggtctcaacaggcctcaatcaagaaatgtgtccttcaacgcctcctatcaagttggtggttgacagaaaccgagaagcctacaaatacgtcctctatccccggcaatttactctacgattattcacctggttttgcaacgtcgagaggcttgtgtctgacgcgctcgataagttctcccttttgatggaatactggaatttataccgtactgacatttatagtatacattgtggaccagcaaatcagacagtgcctgtaagagatgtgattccaagcagcttcactgtcccattcacgccagtcaatcaaatatattagatttgggttagctggtcaaagtgtctatgcgaagtcgtctctgctatagcagccgactgagttgatctactgtcacgcctctggatggacttcaaatttgaagcacaactgctcatactttaggtatgtgaaaacccaagttttcggcttagggtttatgctgtagatatgtagaggtctggaaatcctgtttgaaactgtactgacttgaaagacgcgggacaaccagatccatggacattcgaccatacgccagtgcaagggccacagcttcttgtggtctcttcatcctggtgttgactatcagaacatgtgagttatgggatcccacgctgatctactggctgataattgacagtgaacctttgggagctcaccagagtggccctgataaccctgcactaccgtcagtgctccacgcaaagccatggcttacacacgattcctagccccgtcgcttcgaacaatgcagcatgtcctaggtggaagatcgcaaaccaaggtagcgagtcaacaacagggtgcggccatccacgtgcgaacttcgttgcatagaaccttgagactcccatttccatgctaaggtgagtgaaatataacgcctacagttgcgctgtgtctgattatccgcgccaagccttattcccctaactacgaacaccactgacatcttcacactattgtaggggcacccatcatcgacggtgaaatatactgtggcgagtggcctattccgccagatcgaagacaagaccaaggtgtcggccgacgagcgtgctccatcgcgtcttccgccctcgtccccaccgccttcgcactattgtggagccctgaacctctggcatcgcgacacattcatccaccatggaagtgcaatgtttatcacaagcgcgttcgtcacgcgcgtttactgtctcaacaaattgtcttgtgcaccccagcgcggcttttttgaagcgagtgcagattgcgatgagcttgagtgcgacgtggcatggctggtgactgcattgaagagagttgtaagtgatctagttgtgaagccgatataatcattgcgcaaactgattatcccgtcttaagcgcactttgggatttccatgaacaggtacgctacgacaactcgtccaactagatcagtccttgctgactcggatcgtacaataggagaacaccctcatttctgtcactcgagtcgaatgccacgcgaacaaatatcttgtctgctcgagctcccctatacaattacgattgcatgctctctctcccttccacataactactatcgacaatgagtcaccagaaagttcgtgtcgcgtacctcggcctctttctccctagtgattctgtgtatcaggtcattgttcgatttgtctatatgatacaacccctgaactccgattagcctataccactacccgaatcacacctgtggctaagcgtataacctttcaaataccttcaagtggcgtaggctactggtatcgaatgcgtgatcctcgttgtcttcggatgacatttggtatctttccagaactagaaaaaggcacaggaatgctgatgttttgtcttacttcctggcagatgggcgattgttcgatttgtctacatgatacaactcctgaactccgaccagcctataccactacccgaatcatacctgtggctaagcatgcaacctttcaaataccttcaagtggcgtaggctgctggtatcgaatgcgtgatcctcgttgtctgcggatgacatttgatgtctttccagaagtggaaaaaggcgcaggaatgctgatgttttgtcttgcttcctggcagatgagcgtacctctgcagacaatcaggctgttagcacaagtccacctgcaaggggaaggagacgcaaagtcttctcatttttagcctacaatttgacattggacatctcaggtacaaaccgagaggataagatcggggcacaggcaagccaataagagctcactacccaagaatcacctcgggcatacaggaagctgcatcataagggctgtcaaaagtgttgtggtatacccagttggttcttatacacgcatttcctatccaagccgaagcactatttgcaaagaccatttaccctaggtgtcacttcagctgcaggttagtcaagtcaaccgcgcgtattctttatccgctcatatcgtctcctaatatatcacgcacttgtcaggaaatccggattccctacatccctatttcgacttttttttaaaaaaaaaatcatatattcgtcgagcccaccggacacgtgggcatgttactgttcggccaggcagccactgtaaagaatttggtgtccgaaaccagaatgtttatgggacctcttggactagcccctagatcctggagcaattttcccaccgtcaatcaacactcatatgatggttgcttttggaaggatggccggattgtctactacgactacgagcgaactagcactcctgcgggggatatcacctaacggatattcgtttcagacaacactactagaacctaatcgggtttcaatcaggtcttaaccgtgttctcttatcagcagaatatggttgattgtattaacctgggacactgcttcctaaaaggcaattgccgtcacttcgatccgggattggttgaaatatgatccgtcgttgccgaggcatagtaggagccaaccgggtattctggattgcttgcttgtccaaatctctcagcaacatggttgtctctgcggtaaaattacaatgattcttgcgctctctgggatataagagctgaaatagggtaaggtcgagtgactcaatcgccgcctcaagtgatggctttgacttcgcaaggcataaagcctaccgcatggctaattttactcaagccattcgttcggcacctcatcatatgcttctacacgtgggtcttgggcgtattgcttggtcatagttgaaccagtggatctactatccctatcggattgaggctgtatgccaacttcaccgagtgattattacgaaatagaatctatagtgattgatacatttatccatgcgggtgagatggcatgaaaatctccgtactacgtccgtgagacattgatagacctcgccgcgggccatgaggcccatggattcgcactgagttacttccccctgcctatgggcgggcgggcggttgaccgtagccccgtgtcatttaatgggcccatgtgtcgcttaccaataaggacttcagttacatgaaattttataattttataatgtttagctacgcacgtatatgtcctataatgctacgtattcaggttatttgagtagaaagttatacaatggatgtgttcagctataaccaaacctagtaaaagcaatggactatccagtgtaagtgaaattgaaagtgtgatccgaaatacatagaaattgtgatgtatctgtattgcgcgtaaatatatatatgactacaaaacatgctgaacctacaaaaccactcacaatataatgcctaccagcgtatcagtaaatttattataaacacgacatactagttatactgcatactaggattcgcctttattatgatcaattatctgctatactagtggttattgggggtaggtgacaagtgatagatttccaaaagttgaaccccctattcaggaaacttacataatctgagggtggcatggaccgatggcaaggcctagacgttgaccacctttttcaccgcccgaccattcaccaccacgctcaccaccacgctcatcaacactcatcaacacacatcaacacacatcaacactcaccatcaacattcaccatcaacactcaccatcaacactcaccatcaacactcaccatcaacactcaccatcaacactcaccatcaacactcaccatcaacgctaacggttcaacgcaacaagcattcctagacaacacccatctctgtttgcctacatctgaatgaaatatgctaatttctattgtagtgaggaagctattgcatcacaagctaccaagggaaaggaatgtgaaatacgtcatttggtactgaagaagcttcagttgttagtttatgattttggctattgaattggcaaagatctaactagggccccttctatgtatccaatgatgacccttcggaacaacgaacacacgatgaagatgttgtgcaggtctttgcttctccgaatactcttggaacactcgaatactggtccctagcaccacgaagaggtgcctgcacgggctagaggctcttgttgtagcagatgtccctgcgaggcgctttattgacgcagggcctaggctgcggagaaattggtaatgcagcggtctcctgcgggtctcacttgtcatcacagcgtccccctgcgaagttcatttggtaacgcagcgcccccctgcgaggcatattgatcacgcagacctatcctgcgaggattgttgttgacgcagacctatcctgcgaagcactcttttacatacacaggggtcattggctgtgagggagcgcaagtcttacatcgctgggctcgtggcagcgacagccgtggtcatggaggctctcaagcccgtaggcacgagaggggcaccatgacacatcggagtgtgaggaccggagttctgattttttttgggctgggaatccggctccttttatatttttttcggctacgtctctaccaaggaaccagttgcgcagttagtagcgagaaccactgtctcgttattatcgttgaagacatttgaagaacgttgaaatggtgttagcagactttgtggcctacagactcaagtttcaacctggattcattgctttcaaaaacctgcgtttagtatggtgaaccactttttcgactgttgaaaagacagtgataccgcaaggatatgattctcacatatcattgaatttgcaattaaatcgctcaacgctgtggcagactgactactctgcccgttttgaccatggtcactagccacggtcaccgtctttttcatgagggttgaagtgcttcagcaggtgccgcaataatggggtggagactttgtgtacccgtggttggccataagacgtgcctcccattgctccctctacaatcccctttgcctagcctcgcgctaacggtactttctgtatttctcgcaaccaactgatgttgcctctactaatacttctgctacctgtcggtgcagatactatgaagatactcccaaatccagagtattggctgttttcctttgacagagaatcaaaaatcgagacctttttggaaagcctagaatagaaacccgagtctaggttccaggacaatgaagtgagttatttcagctcccatggctcacgagctaggttttcgtgatcgccactccctcgcaagattgcaacgctactatcacacactggcgagaacctggacagaagtaagaccgggtggaccaattaaacaccacacgttaatttagacagacgcaggtacggttctgcgacgcagatcttagcgacgacccacgggatagtagatcaaggaggttctatttgtggcccggagagaaattggaaagaattgccaaggtccagacatgatccacaagcccaaagttttcggccatcagtgcccgatgacacggggcttttttgcttaaggggtgctgctggggcaggtgagtatttggaatatcacactgactttggcgatagagtggcaggctaaaccccgacccgtggttgtgttcttttgtgttctcttggtcgtacggtcgaattcgaaatcagttttaaactctaaactcttgcgactttattcccggaacttgggtggggacacgctaatctaattttagctcttcacctggtaatccttgtagggctgtattgtattctctagtaacaacaatgactcattgttatagtaccgtaatcgctcgtagaacccgatggaatccttcctgcaaactgaccgaacaagagataatcctacactgattttcgaaatccattctaattccgtctctcggcggacatatcttttattttccatgctcccgcattcaagcgtgctagatcccattagtagatcgcgttatgatatctttccgcaggcctccaatttgtccttcgacaattcgtacagttatctgatttctgtacagcttttgtttgtgtcgtatgtcccaatgtcaccaatgtcccatttgtttcccagactttaaatactggaccacgcgatcttaatgttctacggaatatctctgctagtgatacctatattggtaattgaaagcagtcactgaaaaactagctctacttccacctcggagcgctttgcgctcgagggagccatttctgtagtcgagtgttcgtggacacttgcaatcatgatctgtccctcgggaagttgtccgaccacatcgtcatcaaccacgacttttaagcctttgctattgatccagatgatatgagggatgaggcaagggtcgatatgcagtttcgccgcaagttcgactttcaaattgcgagaagtgcggcctgtaaggtatattgcatgataggtgccctcgggttgctttccgcttagggcgaacaggatatagaagcatgcaactgcgaaatagaagtgagcgtagaacgaatttgattttctgtggtacgaaccggattttgaagaatgctttgcaggagatggagaactctttgatgccccaacggaacaatatgggactttgggcggacgttcttgacaaacagggctatgggagtgcacttgtatgttggccttgtttggaatttgagccgctccttctgataccaagtttatagcccctgtgctatgtcgatcgtctaagagcctatccttcatgttaccgcgaagagcaagtacactcactagacgggccgatgaaagaacctcgactgttgtggccagctcagcgcggaggacttccgacgtagggcttttccgaggacttatcgacgacttgcgcttcttgtgagacgggacatcgaattttcggccgtttatcgcactctcgttgtgacatcgactggcaaagttcgcatttgcctctcggtccataattcttttgctgagcttttcagcccttttgcttatacgtatcttatcgttccataatttccgttcggcaccgtggtctctaagtaccttaaccaaagagtaacacctttccggctcgttcataacagacttgtttctgtcgttcgactgtaacatttccgtttttgtacacagcctgactggtaccccttttaccccttttgcgcgagtgaagtcggtcggtacaaaattgaatttcagcagaatcactgcctcataggccttcgcagttggatcagctgtccaaatgacacaaaagtcattgacagaagcttcttcaagctgtacctggcagtgtccctgaattcggaggccgctctgggaaggctcgataaattcgacagctaaaagcttgcctttccgctcattggcttctttcagaccacggccttctttccatagctgccacgatgcaaccggatttgatctctggtcttctccctctaaagacacatacacaaatgtcctgtactcaaagaatcccccgttattcgtgggtggggtcgaatctgccacagtgaggctgtatggttgacctttgttgagatatgttacaggcttttcgttgccaggctggtgcattgccgtcggggcttgcagtgtcgcattgtaacggaacctatgaagagcctcagcaaacaataaatatagcgtgcgttgggcataggcgtacttttctctgtgcccatatatccaatgttcgttgacctgtgccgtgggtgtggccaactcagattttgggtttgattgtccactgcaacgactagtgaaaatatcttgatagacatcatatagcgtagagtatccagaattgtgatgaacgagagttgtcgatataccattcgcctgcccaaaatgtgtatcatcatatggccaaccttgggacttagccaacgaagtgaagcaaggcgcattctgagggtcttgcggattgggttggactggctcatcaagaatgcgcgaaatgtctgtgctccactgactcaacggagagagtatgtctcctacgttattgtataagacagcgtccgaccctgatacattgcgatcgtgaaatgtctcgtacttttccacgtcaatcatcgaagagaacgaatctggtgcatggaaaccgcgatgctttgagtaaccgctctctcgccttgatgtttgatcggtatttgcctcgtctgtgggcgcaacatcaatagggtcgtctccattgacacagctatcagggagcattggatctcccatgtcggtttggacgcctctaatttccctttcagcttgacggctcaagaaacgatcaccatatttctcccgaaactgattaatgaactcatcatatggtctccgcatgatttatagttgtggcgctgggatgccaaaaaaagaaatattaaagcacaaaaaaagaaaaaaaaagcggcattcctaaaagacagagcaaatctgcgttactcccacccttgttgccgtctgcactcagcagaaagatctcagcccagttaccggctccaccgctgtgcgtgttgtactcttgtttctcccggcactggccatgatcaccgtgggtcttcgagcaagacatcttcaagaacccaaactggcaacgggatattaggcactcgagatgtagataatctggctagctatcacgtggttcacaccaagttgaacaaggatatttagaataattttgctcctcaaccttcggagtattgtcggataattgtgaattcctttttcttctatacgaatttataataaactcaagaagatcggtgaaaattgaaatggcgtttaggagacaatgcattggcgatgagtataaagtgtggggcagaaacactttcagtacatcttctatccctttttctttttccggggattcttaacgagacacgataattggtagtgggtagatcatttaacttccataagtaaagggatcaactcgaaggagaaccgtgtgattgctgggagtttcctccgggcccattgtccagttagtctgtgtaaatcctcgtagatggaggtaagccccaccggtacctcgcggccaccaagttttataaccggccttcgctggtggctctacatcctccaactgctctagggtcagcaactcgttctcattcgatctgtcaagcctccttggcccagtttataatgaaattgatacactgctttcaatcgacctgaaaagggtcctcaaagcatatcatggagcatcacacttctctgtcttagcatatattatcggaacaacaactactgctatagcaatcgcgttagaggctatgtggatggtttcccaatggaaaagcattgttggtactcctacggcttcctggtggctaaggctagtaacaatttctctttcatctgtaagaccgacgatagccaaagtcaagagttatatattaatgaaagctcagcttgcctccgttttcctggtatgcgcttccgccaccataacggcaattcacgtgtccattaagtcggccatacaggacagtttacaaagtttgggagcgcatgcaagcttgggtgggcttttggtcgcggcttggtttgtagtactactttccgtttctgcctctttcatgttatggttcacccgacttccctgaattttctgcacccgccaacgctgcactatatcctgaattgaatgtttgcagccaatgaaacgttgttgtagtccaaaacaataaacttagattttctttgttcacacaaatccgagttaattccactgggggagtttggcctctgatctgtacaatactgtacgcagatgatagacgactcattcaccgtagcgcttgaggaatccaagattgggcctcttcgccgcgttgactggtaatggccctggtacaagaatattcggctcacgaaagacggaagctggcgctcaacctttgtatcccccaaataactcatgtttctggatcaacaagcagccattcaggtgttagcgggctacgcatcattccacgaacatcaagaggagtaataggtgaagggtatgcttgaaggctgcaggaattacgttggagttatcaaggaattttctgctccttaccgctttcagaacttccagggtcggtgtatatattcttagagtggactttaaaacaagaaaacaacattgaaggagttgtcttccaacctcttgaggtttatatttccagcgaggcccatagccagacaacagggttccattcacagtagcctgatacctaactgcaaattgtgtggttgccggcaggtccccagtacccttcacttgccaaaaattggtttcgcttgaagcaacggatgcagatcaagtgatagctgcaacagcttttggccagagtagaacgatagtccaagcagtgttggaaagatgccaggtaacgccagaacgcactaatcaaagcctttacagactaaaggagagttgcgcaaatagtggctcaagcctcggtggggtgaggtcatactactgaggtaagggcgccattttaatcctgatgggtgagaccagctggtaccaaaacaattcttattgatggcctcttttacgtttcgtgaaattgccctatttaaagaacatcactgatattgccacacttatgaacgttctccagtcaccgtataaattccagtcaacgcattcactgcgatttgagaaggatattttctgattgagtggccctacgaagaatggaagacctagagcgtgtgggaaaattaattgcattagcactttgggccctagccctcgtcgctattggtatcttgttcggtggatgcacatctacgtcttcattatcacgcttctattttgttatgaccttcatctcgaaggctgagtctaggtgtaatggcaaagagctgtcacggggattcggcacacacgaagattcggggtcgtcgacttcggactagacatgaaccatgtatccattagacttccttcaatctggaagacaaaataatataccgttgtttgtatttctggcgaaattgattcctcgggagccttatctttggctgttccagttccatcagctactgacgctccgggaggttgatctatcaactccgacttgtcgcttcttttcctcttctttttcttcttcttttccgtgctggccatatcgctgtaggttgttggaacgtcctttcctgtctgtttcataagtcgataggacccgcgagtttcatgtggtggagtcgaaggggtttctataatcgcttccttagcctgagaaataggctcggtcgcacctccagcaatcacgagtcgagctttgtaaactaaagcgaccgttaatgatccattctctcagacgttggcgggggctaactcaccatgatcggcagcgtgggcgataaccagattaaggtgctcctcactgtcctcaattccgcaaattgtgaatacctctcgtatctcctgggctgtcaggcccaaaatggctttatccatggcgggagatgatgatggcaaaagactaagactgcgtcttgtcaatgaagacagaaacccttctggaacgatcggggcaacggttgccctctggcttggggggagggaagaatgagccaatcaaatcaaccacaggcgaggctcacaaaaatagcatcaaccaggccaggcaagacttgaccgcgattgacccctctttttgttgtgtctgtgtcggccattccatatcaaaaacaaatcaaaccatacaactatgtaaatggttctttccgtaaccttcaccgtcaggataggtgcaacgcccatctggtatatgacttacgcgcaaggacaggacagagctttagagaatattcgctttcttaggtcttgatctggcaatgttgggaaagacaatcggatcccatcccttgagccagcggagaacccatcggtgggtgcgttcgtcgccaatgaggtcggtgaatttccgggctcggtatttctcagtccacattgcatatgttgctttcttgctcttatggctcatattattcgattcaatggatcgttggacagcagggggcggcggcggcggtcttgaagctttctcctggctttcttgagcagcttcgtcaagaagtttatggatatcaattccgtagtagctcttctgagcccatccgggggcggttgtagatcggccagcaacaagtctctcgtagggaatggcaggtttgctaggtctcgaagcgacattatgcgatttgcccgagcacgttttgatttgaaataccccaggcggctttctcgacggaccgggagattcaacaataggctctcttgcgacaggaggattggccaaaggcgtcgagtcgggcgacttttgcggcggtcctaggataatcggaaactgtgtgggttgcacggtgggttgttcttgaatctcgaattggctcatctgcgcatcgccaaacgcatccaatgcgtcttggtcctcgtcctcgtcctcgtcgtccaggaatcctcccatgattttctgccgcttgggctcggaggattgcggcggttcgtcattctttctcttctgcgggtctgtaggcgaggggggtcctgaggggaagccagcgggcgaagacatgaagggcattttcaccgtgggaggagaggaaggtagtagtggtaataaacgagcaggcgaagagggtatgatgtgttgaaactgtttagatttggttttggttggagtgtctgccaattagtataaaccagttcaagtcttatctgcacaaccaacttaccaggtcttatatcgtcgtcactgcgaaaaacatccgagagattccaggcgcgatgctggatcacaactttatcgcgagtttgttcaatgcgctggatgttcaaagcctcgaggtcgtcggagaaggactctgaggggagatctaggatatcggagtggaggtgtaaggccggatcgaaggaagggggaactgatggagacgaagtcgtcatcaaaggcgtttagagagtcatttctgtcgtggatatggttactggaatagtcaattgtgtctgctgtggttattgtgagtcttgagattgaagttgaatcgcgaatcttggcgcgtcaagacgcgtagaacacgctagtcccgatttgtcattaatgtatactgcagcgacaacgacaacgacatctcgacttctactcaccagactcgtcttaaatatcgacttttgaatagcagatttctcaatctctaaatctctcactatgtcttctcttacgatacatgataatacagccaaaccagtcctataacggagaatctcatttatatcagaatatatcatgaatccagtcccattgaccaattcaacctcaaaccctctggattgagaatacccgggaccgctcaaacatccccgatgaagggaatgtcggtccaatttccatgggcaatatggatgccaaccttggtggcgatcaaagtaactgcgattccatacgatacgtacttggcaatttcagctacaaattcgacttctggctgtgtgtctagaatcgtcgttagttctgcgaatttgcaaaccacatcaatgagagagaacatgcctttgacgaagcgctcaagcgctccgctccaggacccaaggaggagaaatgtatgagttgcaatgtcgagcccactgtcagtgtcattcttccctttccaatgcggcgtcttgatttccaagacactcgttgcgacggaaagagaatagacaatggcttgaaggattgcgtccatcacagcacgaaccttgtctaccaccatcttcgagagcgctgtcacaaaatgcagtaggatgttgaatcccgagttgaacaatgaaacaaaccagccgatcatctgcaacgtataccctggattttccttattcttgggaatgctgtgcaacgtataaattaaaacaacagcatccagaatatgttcaagcgttactttccctccaccactggaccccgacaagtcggcaagagccaccagagatgcagttggtgaaggctgttcgactagaagctcctcatacaagtcagttccagactcaaaggcaagtggcgagatggaatctgggacactgagaactagggatattccaaacgtagctgctcctgtgatggcagcaaatttgttgaaatctgcatctttcgcagattgaccgtctgccatttttttaattatggcagcgtaccgacccctcggaatggccggcagcttatcaccagtcgctagctttgcaatgaccgtggcgggtatggcgataatcaacgccaaagcatcgagaatggtcagctcattcccaggcgagatccacatcttgtagatggaggagaagatggggacgttgattggagtggtgaggagcccattgaacttgttgatgatggttttgatgatattcaaaagcagctcggtcagtttttccaccccgtcgatgcagtcggttagaaacgtcttttcggtctgctcatgggcatatttggcatcgagtgagcgtttcccctggggttgatattcatctaccagcttcttttggcgtgctgtgacttttccatggtatttgtcctcgaagtttttgaattcctgatccaaattcccaattgcctggctttcctctggagttgccatatcggaactgaacacggtctgcagaaacgtggatgcatctcgagcgcctccatgattgaacttggttcgtgtcagcaatcgataaattccccagagatgctgctgcgtacttggtactgtgcccagtttgaggccatagaattatgaattttgctcttagactgatctgttgaccctgttttatcgtctgccttgataccaagcttctccatgtcgtgattgctgggccgactgtctgagactgatttcttcatcgattcaaagagacccttagattttcccttcaaggaatccgtcaaaatgggtccctcttccaaggcatccttgacaatgttcacaatcgagtcttttgtggctgtgatgtccttccagttaaaaacgaatcctaaccaatcgatgatctttttcccaatgtcaagaattttgttgaaaatgacagacaagaccttgcccacttgatcaacagttttcatggcccattgatagactgtctctcctatctggaccagaactttggctccattcacgatgaacgaaatgatcttgtcgccctgtttttccaaccagtgccaggctccctaaaccagatctgttagtgagtcatcaatatcaagaagagactactttctcaaagcatgtccttgaccccgctgccagctccctggattatgtgctcggcattaaatctatagcaggattcgagtgccaccgaagacggggttttcccttgggcgatcgaatctctcgttttcatgagttgatggatgtttcctgccacttgttcaatctgctccggggtcagcttggtaccgtcgagtagcttccctttgccgggacctaaatcgatgttcaaatcttctttgtgttgaattttagacagcttctggttgatcttatgagctggatcaacaaacttttgcgttgattttgtagaggcctttgaagcatcggtgacagtaaacgtgtgtgttgaaatgtcatctgttggcacagtgagagtgagcaggccagtttggtctgtcctgactgatattcctttttcagtggcgagaacactgcgaccattaacaatcacactcgtgtccccagacgctcgcagaatcaccggatgattgaccaaaggaccaccagaggcgttgagtggttttatttgggtcatgtaggactgcatctgaatcgtcttgtccaaggatggctgaataaggggaattgttttccaaatccctgattttgcgtcctgctccaacatggacagattgccaacattgttagcaaagacaaatgtctcacacgaggacgatgttgctttaaacggagcaaagtaacctccctgatgatccgggaccacctgcactgggggatcgggcgattggaaatcgagatccgtcatgagatatccaatgccattgtcagtgttggccgcccacagcgaagcttttgaactagaccttgtgacttggacctccttgactgaagagaagaccccggtatctgcgattttatcggatgaagggtgagccaatccctttgctttgaacctataaagaccagaacctccaacgaggagatcagtgaagccatcggcgttcggtagagctgccagagctcgaggatctaggtctgttaggaatcacactatacgggggtttatgaatctcattaccggatggagttgtgtctgtctgaagtcagttatgtatcgataaacccttcagaagactcaccagaggcttgcttgagaggcacttcaagctcgtgagggacattgatcgagtaaaaggtaatagcttttttgcctggggtactgattaacagagttctacactgaatgctgctctattggggaatattaccttgaatcaagtataaaacggcatgacccgggattatcttggagccatacttcattaccaaaggctgtactgcgatgatcatctccgcattctctggaagcttcacattgtcctttttcatccaggaatagctgtcctcagacctggttacagccgcagacgcaagatcttgagagtggtagttctcttccttgaaagcgaaaacaactggggggtagtttttgccaacggcaggggcctgaaggtcaacattggtataaaatacattgaacaagacttaccatgaaaatgtcaaacaccctggggttatcctcaccacttccagccatgacgaacgacttgagatctaccgacgaggatgaaaggtccacctcacgaggttcaaagggccgaagcaagcatagcaagcttcgagaggcattcgagtcatgcgcaatggccactgcgacatacaacttggacgctgcgtcctggaccacgtcgaacgcatgaccggtgtaggaggatgcaaagcccagcataaggcccagatcacgcacgactcgatttccagacttgtcgagggaggagacgtataatttggagtcggttcccaaggagaagagcatcaattggccatttttatcatggacggccacgaagcgacgggagtttgggacagacacagcggcgacatactgggtcatcaattcggaatcatgctgaatggtttccatggtgttggaggtgcttgaattcttgataaagagggcagtaatggttttgacagatgaatgaattgtgatattggttaagaatagctggatatggcacttttatgtctgaaagttcacatattatttttgaatgtcaatactgatgatgtctaaaggtacttttgcatccaactcgtacagctgtcaacctgggcagaagctgtactcgatgcagatctaaatgaggggatccaacacggaccaatgatattgccttacggtatatcaatccctctagctaagatgttacacaacatggtctgacatttaagactcgttattggggttctgtggctggctgaggataaggagcacatgctacctattttagccgactccacatctccatgcacgataaagtaaatcgggaaatgatatgccatgagtctacgaacataagcggtgaacacagcctttcgagtctcgattcggttacatttgtgggcgctgaaataaatgtctcgtacttcttgaatgtgaaccttacatcactgtctcacttcagctgaagcatccctgctttgggcaatggattcagctggcatgtgttgatacatcacggcgatcatgttcagctgaaggaatacttatcctaggtggcaacatggatttgtatactgctactacacatggtagacagtatgagggatttagagagttgtgcttgacgctgtttgggatgatgaggtaatagtaagtacgatcgatgcatataagacttgcaccttctttccttctcaaccatcaacatccttgaattcacccttggaaatatccccaccagaacagacatggcatcggaaaaagacaaacgcctccagtcgtctctcaagaccgcgactggggctttcgaccaagccgtagcagtgtctcaagacgcgctcaacgatggcctgtactacctgttcgacaagtacgaggacttgcagaagatgaaggtcaacaagaaaaagtttggccggatcgatgcgatgatggatcatgccgaggtgtctctgccggtcaagtcttccagttatcggacgctcgttttttattgcatttttcaaacggggaagcttgttctcacggatgatgatgggtatggatcgatgcaattctgagtgtatgatggcactgacaatggatccagaaatgacaaaaagccaatcgacctggcagactggcggtttgcattcgaggtggactataccaccctcgatgtaccatcggataccaccgagcatcaggaggcgaagaaacagatgaaccagcctggcgactactccatcaagagacttttcttggactttaaaagtgagcgatgaagctgcctattcgtagcaatcactaacactcactagcccacaagatcagaaatttcaacaaggacctgagcgatttcaagggccacaattgggacagtgaagacttgcaaagtttcctctcgctgataactttctggggcgaccctgaaaaaggcgttatgaaggacaagcaaaagtcgacactgggatactttttgacgactgcgaagcccgaaacagtcaatccgcccgcaccgacattcccacccacctccgtgaagcatcagcattacaaatacatcgcacctgggaagcagacacccgacgaaggaccgaaagatggcaagaacaatatgcttttgtacttggagatgacccagaaccgttccttccccagtgaagacatcctggagtattcgggcaatttcgtgactccaggcatgaagggaacaacgtgcatctcccgagacatcttttgggattcgtatcttctccggaacccgtctctcagtggtccctatgggccacagcctcctcttctgcgcgagttcaatcgacatgtctacgcttggcttggggaattccacgtctgggccaagaactattccaccgatctttcatggagctacggatttggacacacccggtgggagccatctcgaagcccagactacttcgcatggaagaaggtctctgcaaataaatgggagtggaagaataaagacaaaaagagcggccatgatgaaggaatatggcctctccgtttggacgcaaaagcgagcagtaagcagtggctttggcattccataatgaatctttctaatgacatcttactaggtgatacgttgaatgaattgaggtttgacccagggagtaacaaaatacatctcgaaggctgctcgaaagtctgggcagaaatgaaaaggagcgatttccagaatatagaagaaaagtgagtgttctgacatatatagcctatccgtacattatgttgatatatgtgatagaggcggtgttgccatcaactgggcgctagatatcactatcgactcagtcagcgaaggagggctgaaactgaacatgaatcttccagccaatcccaaggacattttccacaccactgcactgacaaagccatttgctacagaggccgaagagacgcaggatgaagccgagcccgctgagaatgaacccgctgagtccaccccgaaaacaggaaagactggtaagatcagtgtccatgacatgacagaggcggcgaatgatgcagctgcaaagctggatttcaaaagcgtgacgagcaatctccagactgcgttggagaattcagcgcgttttgttcttcctggaggccggcagttcttctacaacaacgccgtctttggcaataatggggatttgttggtggaggccaagtacaagtcttgatggactgtgagctactatggtgtacccatatctatattcatatagttataaagagtagagtgtccataaaatcaggtatacatctcagctcgatcctctcgcattcatccacagatcccagcccaaagctcctccttccaccctgccagctcaactcaatcatctgctttgcaaagattcgtagatcatcttcatattctccaataaccctctcatccaccatattaccagcagcagcaagtctccgtgctagatccgctgcatctcttaaggccgtgttggcgcccattccagcagtcggtggcatggcatggattgcatccccgagcaacgttactcgtgaggatttccaaataggcaactctgggggtgctgatgagatacgcagagtcgatgtttgtgctctatcctgcttttcgaaaactgctcgcagcgcaggagtccagtgctgtgtcagacggagcgccagatcagccgattcatcgttcttcagacgtagcttatcgctgcgtggatggtccggacgaggactacttgccgtcttgtctcgacggggttgacttccaggtcatcctcccacaacacggccttccttccggcgtcactcagcagcttgctgatgctttggcaactgctcgcgagagtacgaccaccacggagcctttcacggactggcgtgtaagcccagagggactcgtcctgctccgtcgtttgccaccaaattcccgaaaccactggcaagctgttatcggacaagccctaggccgaaacgatgaggaagacggcacttgctgcagtcggtgcgagacttaagtgctgacagtgctcttctaggctttccgaaaacactaggatgtcgtccagataaacgaccactgaatcgccgaggaagtcgcgaagtgtctcattcatcatcgtctggaaggttgctggtgcattacacaacccgaatggcatcacacgccattgatatttgccccagattgtgttgaatgcggtcttctcgaccgcatcttccgagagtctcacttgccagtatcccgatgctaagtcgatcttcgacaagtacttggctttcccaacaatatccagtaggtcttggatacggggaagcgggtagccgttcttggcagtgagttcatttagggcgcggtaatcgatgcacatccgccacgcccctcaggcttcttgacaaatataactgggaatccccatggactcgaagacgtctcgatcagtccacgctccagcaagtccgcgaattgccgcttcaattccgccaatttgtccgccggcaaggggtaagcttgccggttcacgggatctgcgtcccgtgtgtcaatgtaatgttcgtatgacctccttggaggcatctctttgggtagttcttcaggaaacacatcctgatattcctggagcaacttgaggatcctgggttcacttgaagaagcttccggggttgttgccttggccgtacagagtagcatctgtgtctgttggtcgcgaagggcgcgtcggcaatctttcttcgacagcaagttaagactgctgacggatttacgctccaggatgcgcgtatcaatcccatgaacctctgtacgcttatccccaagccacatcttccgttcaggaaagctaacatattggctatgttctttcaggaagtcgttccccagaatcacatcgtacccagcgatatcgatcgcccatactttcttcctcccactccactcgccaagatgcagatttacggcacaactcccttgcgtgcgtaaggtctcaccattagggagggatactggaagggatttctttttgtcccatctcccgccaacgcgctttgcggtggccagcgagacgaatgtgtggcttgctccacaatcaaggagcatccgcgcgacaatggccgtccgcgcttcgggtcgctggaccttacgatcgaagtaggtcagctcatctcccagggcgttcagccgcatagaggcttgctcatccggcaatggtaattctcccacttgcccggcttcaaccctgctggattggatatccatctcgacgtcatcgagtcgaggatcatcactttcttcatcctctaagaggtcttcaacctgaacaggttgggtctccatctcgatatttgccaatcgaggatccttattgctgtcagatccggcgactctatccgcacttgctccgcttccacgtccttatttatccaaagcatgcttcggatcgcccatctgccttccctccaggtggagggaaccagcttccgtactcgcctcaaagaacacgatcgtcgtcctggatgtgggactatgtacatcgtgtctgtgccgccaggaagctgagataccggcgaacagaacgtccacactagcagcatgtcatcgactggagcgctacattgctatgtcgaagaaacagtggccaactatttcgatgatatagtcctggtgtatgctattaccataaaggctgtgcttactcgacaatgaacactcagcacgagagatataaatcactccatggatttcgtataggaaggagcaatcacccttgtttggaattacaacagtagtgagaaagttccaaagtcaaaggtgaacattcgagcatggtcgtggtgcctctgagcaggcccagctacacagtttcgtccttgtcattctaaaccaggggcatggcccatgtggcctgcaaaatattgcggacagtgtataagaattcacggtactatgcgcgttcccatagagagataggacagggtaggaaggggctctggcactgaaattttcttagctcagtaaaatatacctggtggggtttgattgaatcggtggtcgaaaacagtgtgatctgtggagggaagcgtccgatctgctttcgacccacacccgagtcacaaggaaatttaagtttgacacagactgcggaaccacgagcgggactgccgatcagtagcggaaccgcaaatcatttcgaaagctcgtttgggtgaaccatggaaatgcttgcacggtgagagaatgcggctgtaattaagaattcaagcctgggtttctgcctactttctttctgggttgctcgtgattaagccttgcagcccgaaggaaaagagaactagagcagaatcaccacaatctccgtcggctggtatgtaggataaatttatttcggtaaggccaatattttattagagattttcattaaattcagtatcatgatcaagatgtgcagattgattgaaataaagtttagggccgcaggagggccggtccacattgaaatcttgtccggggccaatcggttttagtaaaagggaggcattttatttaagctcatgtggttagtccataaatggcatagttctttacaagccgtctgctagagttattgaaatagcggtagatttgaagagatggagaggaagtgttgttatggcctaaagagagcaataatcatgggggaaaaggcttattgcaggagaagatacgtagcttctagaacgttctacagaccagataggcaaagttctgcttgccacttgacaggggaatttactttctcttcactgcgaccaagtgaacacaaccacggatcgagttgtagcctaccattctgtcgccaaagtctgctgttattccaaatactcgcccgccccagtacctcctaggcaacaaagtcccgttccatcggacactgatggcaaaatctttgggcttgtggatcgtgtctggacctttgcaattctttccaatttctctccgggccacaattagaacctccttgatctactgtcccctgggtcgtcgctgagatctgtatcgcagaaccctacctgcatctgtctgaattcacgcgtggtgtttgattggccggtcgggtgcttttcgtctccagggtctcgtcagtgtaatagtagcgttgcaatcttgcgagggggtggcgatctcgagaacctagctcgtgggcctttactaacagcggccaactttaggcttatagatcgtgtctggacctttgcaattgtttccattttctctccacaaatagaacctccctgatctactatcccgtgggtctccgctaagatctgtatcgcagaaccctacctgtgtctatctaaattctcgcgtggtgtttgattagcccgtcgggtgctatttgtctccagggtctcatcagtgtgatagtagcgttacaatcttgcgagggggtggcgatcacaagagcctagctcgtgggccttagttgtatcagttcacatggttatcctagaaactagacccagtttcttgtctgagcttttcaaaggtctgggccctttgggaagccaggagatgcgaccccggacaaaatctcggagggaagtgaggttgcgaagaggataaccgaccctttggcatagatactggaggagaatagagagaaggagtcagcccatgatgcgacacatgaatctcaagataatacgaggcacccatctacataccccgtgaatatttgaagagccctataccggcctaggcatccatcgaccaggatggaggtcggtagcgggagaatattcaccagcacggtgaacgccagattcaccatagtcgctcgagatttgcctagacccattgctcccgggactaagtcattcggtctattctgcagatagttttctggggttgtgtttcgtcagcggaggcagtgcccatggcgctgagacttggagagcatatactgacgaaaaagagtttgcgttccatagtatgagaatcgcgcggccattcctatagtggccgccaaccagactcgcatgggaagaggctctgacacatgcgtaagttacaaatctcgtcgtcggacgccagactgccccctggagcgggggccgtaaccccagactcaattttaacttcaacctttcctacggctcatccatggcggggtttcttttgttttggaaaccctggacgtgagtttgtttcagggattaaggagattggaaatccgaatataggcaagagagcaagatcggtgctagctcgatgaaggtttatcggcatgatatcggagtcgaagccggagttcggagtattgacacatcatcgatgccgagaaagctccgtaaaatgacgaggagagatttaacttccagacactctgactggtatccatttcaaggagaggaaagctgtaacgtatcagcaccaaatcccagcgacaatgcctcatgaagtgtgtatattgattgatgacactcaaaatggtagtgtaaactcttctcccgatgagccactagaactctgtgcctgacatttcacagtccacgtggagattgtagctaccagtcttgagccgctgcaaaggggagacataaatgagtgcagtgtgctaacggctttggtgcagcctttgagacgggaggtaatcgataaaatccgaggcttgtttccaattacccgatcaatgctggtgatggatgccggctcggacacacccgtcaaggccacactggacccagccaatattagctccatctgcacatgtgtgggcgatcaaaaaggccagcaaaccgtcctttttatcatcgccaaccgagaagggtatgtggttcgcagtgacctattccaggatcgactgcgcggttgcccagggatccagaaggtggtcagcctcgtcagcccccggcaattcgtcggttttcttccagccacggcccatggtttggcaaaactcgtcgggttggccgtttgctgcatcctggccgatggtatggacgcagcctcctattgacagctgtcagatcacatgcaattgcggctgcgagagaggctctcattgcagtgacagtcaccggcgacaattcccctacacaggcttgccgtggtcggtgaggtccgcccggctcatctctcttcgcgattcttccaggccgctcgagccttgggggtcgagttagtagccctagggccccgcggccattggctacaggatccagaatcgcggaacgacccagaccgagaagtctttattgaattggatctgacggtggatcctggccttccgcatcggattgtgactactattcaagactacgctggcgaaatcgatggactaagtacagtgactgaatatcttcttatacctgtcgcgcaagccgccgagcgactgggtctccccacctcaccatccatgtcgtttagcaagtccgtcaataagtaccagacgcgcttagaggacagcccgagctcctgccgtctggtctcgggtctggatgcttttcaatctcagctagcatatgaggaggaaggaatacttcctccgggcccgccgtggattgtcaagccctgcaatggctggcattgtctaggggccaccaaggtagccacgaaggaggggctagtggcggctgtggagagagtcgccaaatatgccgcctacagccgagatggaccaaatgcagaagatcctcaatggcagaccaacgtgttgattgaggagtactgcgatggactggaagtcgactgtaatttcgtcctatgggacggtcagatcctcttcttcgaggtgattggtaactttccgtgtgccggtgacaccgtggcagagggcatgcaaaccacggagaatttcaaagaaacacagctagtgttttcctcggctctgccaccatcggagctgtacacgctgaaatcctctctttacgacgctattacgcgtctgggcttccgctccggggtcttccatgtcgaggctcgggtgggtgattcgagtaatcggtaccgagccgcggaagacgacgagacgctggacttgcgtcccagaccgaagcctgcggcacgccgtgcgacagtcttcctgattgagaccaacgccagacctccaggctatgtggatacctgcgccagttactatgcaaatggggttgatctgtttgcgctccaaatcctgatcgcactcggagacgaatcaggtcacgagccttgtcccagccattccattctcgtccccacgttgtggtctcagcgatccaagcaacaaaggccgggattatcgcgtcggaagacccttggaaagatattgtccagaagaatcccacgttgatgcgcagtgtggtgcatcatgtcatgagttttggcgagggtcatcggatccagaatccgcggttagacactacaccatggctttcagcgtttactacatactcactaaagaatcgtgcggacgcattgagattatgttcacaggttaagagagagtctgagtgtgaaattgtttaggtagactgagccttgcttatttgcgcccttccattgcgaaccctccaaagtaaaacaaagttcttcgaaagtcttaaatcttctttaacgaggtcatcttcgtttctttcaacactgcatttgaccaaaagatgccccaaaatctgtattctggagcagttgaatcccatccatatccaaggaaaaaaagcctatcgaagtcgacgtcgaagttgcgctcagaatctctataaggcgcgggaatcttcaaccgcggctccaggatctcatctagaatacgagtgaaaacagctgcagtccggttaaagtaagtagagctttcctgttcaggacgggccgtgagctccagatgcgagatgaacacactcaggttgcgaatgagagacgcttgggatcccgagtagagcatcggccggcctgtctgggcctgtttttgcaatgctcgaattaatacgctggcgcctggaatcccataaagaagaagctagccagactcgtacgttagtgtaagtaaatatccacgggtttgaaagagacgctcactatccaggtgaggtcgcgttgaatggcaaccgattgctcccactgtcggcccaagatcaagacggtggagagtatcgttgcactcagtcaaggtgggaggcacccgtttctcctgagtccttgctcaaaaggctctggaccagtaactcattatataggtaggccaagtaagagatgagaagcatcaatttcacactggcaggcagatctgttccccagcactctagtgtgtaatgaagatgctcgggcagcgaaatccaggcttcattgtagcgacgagatacagtcctaacaggcagtcgatgagtatgacaacacaaccgcttgtgctcggacatcggtagtaaacttacatcaatagatcggtccgttccgggcttgacttctgcaaagaaagctccgagttttcttctcgaaatgtgccgacgatgaatcacaatcgtatccaggtcgctctttggtaagcctttcccatattccacccctggggatccagggaggtctgagcagcatccagaatctcggggtctcctgttagtacatgatcgccaatgtcgagcgggagacaacaatctgagtgtcgccatgaaatttgtggcggacgtccaagaaaggtcgcaatacctttatcgaattgataggcggccgcgaagagccttcgtcgagattctagaatgaagagcggcagtgccgtcgagctagtcgtgtctctatgcacgcccaattcaaatatattcgtcgcgaactcaccaagacgctgccaggtgatcgaacctagaataagctccccgtcagtggtgactgcctttgagcggaatccgaaaatgggacccactggaatcactgaacaataaactcgtccgcaactcttacttttccgccctccagccataatggaaagttactcttgaccagaatagccattccctacgtttaacccatagcatgttcgcgttcccgctcgtcaaagatacgggggcgttactaaatgcgcgctggcattggacgacgcgcgtgaactgctggatctgttgctcggtggccgatgggccatgcggtgtcctacgaccactacgattgaccggtgcgacccagcaatgccggtcacgccagtgcttacgtatagtcctagctttcctagcgataaatcgataatactgggtcttctcacataaaatgtaatctagatgaatcggtaaattggcgatcgggctcgttaccgcggtcggagcttgccattcgttacattgttccgtacggtcccaacgttggatgatatcgccgattcggccggcgtatgtaaatgacctttcgtggttttgcattagaagccttgaacccgattgggtcccagacataaatcgacgttgtggcccggcccatctgcggccactaaagtctaactatttcaagcactttacgcatcttaaccaagacgctcaaaataggaaatctttctagatttccgctcttttacggtatcctttatattaataggccgagattgcggtgattttgccccgattctcgtgacttttctcgtgagctactatagaggcttaatcacgagcaaccaagaaagcaagtggggcagaagcctgtagataaactttcgattatgttcgagcccaaaaccttcataacaaccgcattcttttccgatcaggcggttccatagctcatcgaaactcatttgcgaaagatttagaggttaactactaatcggcggaatcatagttccccggtatttgtgaagttaacttttccctacaacttaagtcaaagggtcctatcattattatttggcaggggaaaactatgcatcacgccaaacattggtagtgcatgcatcgaaaatcaactgcaagcctcaaccttaacactagagagaacttttcttccgacccacccatccaattctgtctaattcccccgccgccttcaccattagcaatactgtacgcatctaattcgcgttccctaaccaaatctcgttttgtttcgttttatacgcgttattcttgctacttgtttgcgatccttcagaatgtctgacttacagttgagagaggattcgaaccaccgtggatcgcgtcccaatccaccacctccgactggcccgcaacaccctccccaacctccgtccccagggcttcaaaccgcttaacgaccccttcccgatcacccttacccatctcctgaatcaccttaatcttgacctgcaaacgcccaactcgaatctcaataccgataatattcttcttcagcatttcaacttaagagtctggcgcctcgggccccgtcctcccctctcttcccttcggggttagactccagtcacctcgatgcctccttgtggtgccaggaggatggcatcaatctttctctttctgtagggcaacaccgaacaaggccgatcaattccaggcaaaaagagtcggaaggtccagggtcttcggagtatcggcgttcgaccccgccgaaaacgccagtctggaatgcgacctggctagtcatcgaccctacgagaagacatagagagtggacatatagtacacagtttgttttacattcagacaaggagaaagagactggaacgaaaagaaatccggttgttgcttagcgctaaaagatagtgtaacttcgaccttttcgaacctttcactcgaaatctcccaagctaaaaaaacaccccatctaactagaatctcagattgatatcagcgccgcattcgaccaacgcctcgaccatcgaagcgtgcccgttttgaactgcaaggtgcatggcggtcagcccgtgtccatccgccatggacaccgtcgccgccgcaccatgcatgagcaacaagcgtcctacccttgcgtatcccagagcggcagccacgtgaagaggcgtgcgtccgtcgttatcctgagcttttacgtctgcaacatgagccagcaacaccgaaactatatcttcgctattcataatcacgccctgatgcaacaaagttcggccgaaagcctgcccattgcatgccctagcgttcgattcaatctccgatgacggggagaggaggttcggatcaagcggaaacgacgtgtctgaaggagggacggcctttgttcacagattggtttttcgtaaattcagaagacgagggaagagagagacaagggaagggtaattaccactgaaaagtgctcctcgactcgagagctcactgttgaagagtctccatcgtgtactgttgacggggaactgtataccctcttggcatatcctgccgagggaaggaaccggtgagagagaggatcattaggttccgtggacggtgggtctatcggttgatcgacttcgacttctggaaaaaggcttggtaatatcgattgagggtgcatacaagggtttacaccggctgatggcaatgggcaaaatttttgttggccggaccgtaggtctgccaaatgtgttgaggggttggtgtcatttcctgggtgttgaagactttgtcgcagccgatcatacttttccaattgctgcttgacagactcacctgcagatcccagatgaggtttgctaacgaggtgaaatggagccaagagcgaaaataacaggagaactcacgatgtttacgctgtgcctgccgattgcgttcccgtcgctggtcttccttggacatttgaacaaggacccgcctcgctggacggatcggtgtttgagggtatccagacccaggaagatcagggaatttggatgagggcatcgccattatcactcgagtggtggcttctttattcgaatatgaccggaatgattcctatgctgtccggcgcggatggccgagcaatgacgagaacaaacagtggttagcactttcctgggcttaagtcgggagaaacctgttcttagaaggattttatggtatgtcctaacagccgagggccttgtgctgcggccgccttgctagattctccaggcgtggtgctattggagcatctaatacccacttcattaacaagcaccgttacttccactcgacgagatgaattctttccaaggagatatgggtgggagcctcggtgtacgaagccaaagtacaggaaccatcggtaaatggtacctttttttacccgggtaggcatggactatcgccccgttgtccgatccgcgcagaggttagtaccccatccaccaacagccctacgatggaaaatgcaaaatctgaccgatctggtgtgatacgacgtcacaaaccaggaactgatgaggggtcaacatcttagctaaccaattatagactagccccatctttcacgtgcgggctattgggggcgggcaattatgccggtgcaagtgcgacgtgctttttgttaattgcccttgcggccgcagcttttcgccatccgaaggccagaatcgtaagtcacgctttgaccaagaatttgtctcgtgaatatttactgtgttactgtgtcttggtcctagagcatagacaaaatataatgttacatttgatgtgaggttagtcatgttactctccaacatctggccccataatgcgggtccccaattgtagttggtgccccgcgcgatcaccctttaggttcaccatgggtcggagacccaaatactcacgcaatattccctagtatggtcacacgcatttcaacggcatatccttgcatcctctgagacaaggctagaaccaccttcggataggaaagttgcgaaaacctgttcgcgccagtctcatctgtctaccattttcgatatcaacatcagcccatctcctaacactcggagaggcctacctacctagatacctaggaactacatcccgtagttcgaaactaccaatgaacaactacaaccctgccagtttatctgtctgataaatgttcgaataactatcgcgctcggattttcttttggcaattgcgcccatagcgggtaacaaaatctcgggttcagtttagttctaccaatcaagaagctcaattctcaaccgcacgcgatgtaaccggaccctggcttagacctgaattctttccttggtaattatcttctccaggaatccttgacttgctcgtgcttcggttgaggcgttcctggcccccagaaaaatacacaatggatggatgacgtcatttaccctaacccctcgcagaataacgtgatatgtgagaatacaatggacttttgatcctcacgccttgtttctcggtccatacttggaaagatgctaattcatgttgagatacacagtaaataatccttatctactgtataaatagatctttatcaattttggaacgaccgctttaggtttaatactgtatacactgtataaggaactcctatccaccgctagctcagcgccccccagtcttctcatcactaatatccaacagctattagagtctctgcggaatacggatatttcatcccaacctaacgctactttttattcgcgatatgatagaaagcctgtcactattgcacccacgtcttgaaaggctgacacggctggatataggaacggaactaattcaataatctgcaaaaaaagccctaggtacatatatttgccttggctcgtatgacaaaaaaaggagcataaatgcttcaaaccttgataaactggaacgaaacagggtttccgttcagaggcttgcagtccgttccggtctggtcttgatcaggattgaaggtgtcgacctcttggccggcggggcaatcagccgcaccatagaaaacaagcatgccgtcagcatctagagccaaaagctggagtccagcaccgccgttgccgagaccattgtggcaatcttcgtcatcaccagagtaagggatagcctcgccggtacattgaccattctgatagactgcgatgcggtaatcatttccagctcgagtattcaaggcattggtgttgttgcgctgttcgacgttcggaatagacgctccttgcaccagggcggcgcttaggaagaagccgagggctaggttctggaatgatcccgagtacatcctggtttgcagatttgactgacgataaacggcactccaagagggtgacgctggttgatatgggcgtaagcggttctgagacgttgagaccactgatcggagttgtcgagatcgagactttggaaatcctcgatacgcacacgaaaatcgtgatttgaatcaggtactggggtcaagtacaagatgtcgtattctgtgtcgtttcgatgctcgaggatatcttgttggatacgatcaacaaaccggacgtcgagcgttccagcgatctgcctttgcattttgtgtgagacggaaattgaataaattgaatatgaagacaggtagtcgaaagattccgagagtagatgcaacggggatggggcaaccgtttaatgtttgatgctaggggcggtggtggcaaatgtgacgataaggcataattccaggaaacttacctacttgctcagagtatgattgaccttaatgaacatgaatgcgccaacaagaccatgaacattgacgctcttatacccgaacatgtcgttccttcgatggcagaccgactgcacagtcatacgctagtcagcatgaagattaaagcagacattgtacattcctgcttgaatgcccagcttgcaataggctgctaatccgaagcactagaccacagcgggacggtgttcaccggtacactcgttatgatcaggttataaacgacgtcgatgactgtgcatgataatgacatcataacaagttgttccacagcaaagctctcgatcattgcgtggtccgcaaattcccctctgtattcctgataacatcattctttgacggccttgagtcgaggacattggagttgcctagaagctattatcggttttactcaggggaccggtggggcaactcagcctcgtgccccgatgtaaagtctaaccaagctgagatgaccacccgggggaggagggggggcgcggcgggcgcggagagagcacggttcttggcccgtgactggaccccgtaatggaactgcgcagtacggttggcgtaataacgtaattggccaactttcataggcttgagcgagcctttcatgccaaatctagttagtcaactggagagacttcctatgtagcggaaatcctctgctgagtgggtctgatcagggcggatcatggtttctctttcccagagcataggatactgcacgtgatctggtgacagatctgtcggttggctctcggtggcccactgtgttcccggtgggtcgccatcgattggtgacgggtaggtccgtaataaccagctcaacggttggcggtccaatattgattttaacgaccgctattcaccccgttttactgtcggcatttgccgtagacctataatactaggttggatttaatcttatcgatgcctagaggttggtggtcctaagctgcccggatcccgggcagcccgggatccgggtcaacgcgctgacctcccacgagccccgactcatcgtaccaatcatcatcggagcagcccgcatgtttcaacctttcaagtaagagaattgtaactacttataatggattttagcaacttggagcatattgctgtccgtgcgttgctctaagaataacccgtaaaggtaccgggctccctcttcgttttccgtcttcgaaattgcttgatgttctactatgccacctaagagtctacaactttattgacacttatttggtcacggaactcaaggacctggcatttaagaagttcacagcggttgtgataaacttaggaaagccaaaaaatctggataagcagctcgcggttattgattgtttatcgttagcatttccgaagtcgtccctccacgataagcttcctagatagctaggtcagtacgctgcttagcgcctagacaatttacgtctttagaccaagtttcataaattgcttcaggtatttctatcactaagctatcgtataatagacactttgaacccagctaataaggctccttagaatatcaaatgccctaaatactatatccctcctacgatactcgcacttgttttaaggggaaccactactaagataagggaaagagggagagtagaggagggcattacaacccttattatttcccgcgttttcttttatctactttttggactagcccgaatagctctaggatatatatataatgatttggtgaatacacagaagccgctataagtaacttaactcgtctaccgtatttataccttatagcaaatcctttatcttccatttatccctacctagctatcatccgatattagatagcttgattaccctatctactctcaccaaggagaaaactcgttccgtctcgagcgctttataaggctcggatctataaaataaatgacttcacggtatctaggtttctagagcggagtttaaccatagtgtagagcagtgcttaatacaatatagacgactcgatactataagtctgcccaccaattgcggtttttatatcagctgttagatatccaggactgactagagcgtgtagaatccacgctggctggaaagcctcgtcgaaaccgtacgtaagatctgcgtcttcgccgtctgacttatcgacttggaggaactgtttggccttttccaaaagtaaagacactactttctgtcccagcctttccgacgtagttcaagcgctgtaacatgaagcttttcaactaggaaagagggccatgatcaagctcgttcccccatacagtagttcctctctgcactggatggtccttgtacttggccttgactgctcccgatcgatcaaagatatggaaggccacatcgcacgtttcctcgttgggctcttccatcctttcccagaattcagagcgtatatcctctcgataaatataccgggctagagcgttggcgacagtgataccatcgcaagtgcatttagcgacaaagttttttatccacttgaaatcgtccattccctcatctgtcaaaaagagccgaatctttagagttcgtgccttattaccggagatggtgtactcgtgctcttcaatgtcctgttcacgatccaaacattcgctctcatcttcgctccaccattcttcttcctcggagttatcgaatccatggtactcaagagtcatcttctgtcaattcatcgtatctggtttctatccctgattgtcaaagcaatatcagtatagctcacatctcttatgtgttagtgggatgggaaggtgagcgcactgagggatcctcggtccctttccattttctccccagtattttccattcttcttatcaaccttggtccctggcctaattttggggcgagatttatgaggtaggagaagaaaggcaggcgggcggcgagacaaaaagtgggatcagccaacaagggagggaatcttctacagttgtacttagtaacgcggtcgtaaaaggtgacttgaccatggattccaaactcatgtcgaaagacttcatcatctcgcaacgccttgataaccatttcaacaaaattatccaccgtgtctcgctcaaaatttcgaagggacgcttccgaataaatcggcctgttctggatattcgtaacgacataatctatttgggtatcagaagggaagagggggcgcgaggtaaaggcagccgtgcggtcgaatttcctccagacttgctcctggagctgagggaaatcaagccaatggactatgcgcttggggtaaagtctgttcactgggtcggtcgcatcgccctgagtcgtgacggtcgcatccgtctcaactcggatcgcttgagatagagtgtttggttggagtcgccgttcagcctctccctggaggcgctctgcttcttctcgcgcctttctctcttttcctagcgcctgtctctcctcctcaagttgacgtcgtagctccgcgattgtttcttccatcgcttgttgaaatcactatacagcagataatcgactgatgcaaatggaagtcaatatagtaggggttcgctgtctggcggcggggagtggcccgtcagggcggaatgcgtccagatgtttaccagcttactcacccccttggctcgagtcgattcatgcctcaggcacggatgacatcaacatgcttttggtctttcggtaggctgacgctcagaggtccttttgtttcgtcgtatagagtactagtgaaagttctcccgtctcgtccgagggctcggaatggagaggaggtggttcttgcaggttgaaatcatttcttgccagagactgggggtgcgagggtattatggaatgcacggatctgcgctttaggtggggaaggggctctcaactagccaatttttttagtcctgctcggatatgggcttcgtccccactactacggaggtgaacccgatcgctagaacctcggctccatcttcacctagcaccattcggaagcccaacagtcagcggccaacaacgaccgccacccagcttaataacgcgcggaaggtcagacaatcacccattattcgggcgcagcgcaaacgcagcactttggctaccatttcggaggaattctacaatagccttacccaggggatcaactccacaaagccgcaaaatcaggatatccgctccctctaggtcagcagcaataagggttctggctaggactcggtgtcccccgagccattatcagaaccgatgatgccccctcctactcttcctccccctcggatctctcctgtaattgctccccatgttaaagattcttcgcctagcactgcggccacccctgcgcttttgatacgcatacagcggaatcaacattcgcaagaccccgtaggccagttccgcggtcaagcacagctcgcggggcctgagtgcccagatggagtaatggaagatataccacttatagaggcggccgctcctttgcagctgcgtccgaaacccaaccgtatcgataccgctgtacggaatccgtcggtctctacaaatgggacacctttcttggatccttcgtctgcgacgtacgataaacctcccagtgcctctctagctcctagtccccgcacagatgcaataccgccttccagtgggccggttcctcgaaaatcagaatccagaactgcgtctaatcggaaacgagccagtatgagttccactcaggctagtccacagttacggcccaagattagtcccagcatccagccccttataaaaggcagcgatggtgagtcttgaatccgaattgaattccatggctgttgtactaactatatactagacatgtcataggatatgctttacctagcatcgaaatctaactatcaacacattctcaatggcactctgccatcgggcgtgagctgcccagaggccctagcagagaaatctgagctcaaagcggacgaatcacaagctcgcatagcagggacgccggaatcgaatcaacaatacgctcaagaaggttgagcttctcgttccgcaggagtttatcgatgaccgcaatgctaaggaagctgcagaagcctgtagaaaggtcaacgagaaggaaaaagagaaagaaaaggctaaccaggccatcagcaaggccacccctgtggagatagccattgattacatcaaggccccgaaaaaaaacttagacacaaccactgctaagttggctgccgtcgaggccaagttttcgggcgagccctctacggagagctcaacctcaacttccgcttaacctgaggagactccgaaaggtgtcgccaactctgaaacgaagagttcggcgtgatcggactatattaccttaataagaccagatcttctgcttgcccgcatagtgatgcaatctatgcaacggtggaagatcgaaaaacgggatattccctttccggggtggaggtttcgcgcaattgtgttatggatccatgatctaatggggttttctttctgtttatttttataacgtgatttgatagcgccggtgtttgaactacgagggtggctcatttttgcttgtactagttctatttttactatgtctacctacttgataaccactgccagttcttcaattttcctttcttatcttcatcttagatcgattttagatgcatgaccctagtatttgcttatcatcatgttccatttaagatcgtgcccatgaagtcaattgactgtatgcggaatcagaatcgggagtttgcgtctgctccgtactcaattaataacctgacaaaaggagctttttggttctgcaccgccagatgaataggcgtcaacccatctttatctgtcgaggagatcgtcctatccgccccgtttgacagcagcatattcccagactctacatgaccagcaagggcagcgtagtgtagtggagtctgaccatttctatcttgtgcttgcacatcagcgccgtgtttcagcagggtggaaatcagctttccgttatcaaggagcacggcttgatgaaggagggaactgccagaaagtgactgctttcgaaccgatagagagctttcaactagctctgttcgatcggtgcagttatctgaaggagaagccttaggtagtgttaatagttggtctagcaatttggtggattttaccctcactctctgatgtgtcttgtgcggaccatgaccggttaccgagaacggaagactatacccccacggggtgagctccgatcccatgtcgagctccaaaggaaagtatgcttcgttgtttggaggggatatatgaggttttgcgggtgtgactgtgacttccggaggaatgccgcacgggcttgggagcagatctctcgttgtgagaacatttgggccttcggcgtgagagccgccaacattcaagcttttactttgtttcgtgaccctgagcccttcttgtatgttggcattttgaagaagatattcatcttgtcgcaagcggtgtttgacggattctcctacggaaagacgaaatcgattagttatattttgatatgaataaacgcgtatgtgttaacagaactatacgatgcatagaagagtgacttaattttaggtattctcacggtagttccgctgtgatacgcaatttttcgcgcgccgttgctcttctgtgaggtcccgaaccgatgtgtgaggccctttagtaatttttccacgaggatgatgcatcgtgtttttcgctcagaattgtaaagctgctatggtaaaaactgacttataaaaccccaatgcgatgaatgcgctcgtggtaaaagaaaagggttgcatcctgttattcttctggggcggctgagcaaggtcttagcgaaaagcatgtgctagtcaagttgggagtagttgcttctttttctctagtgccattaatctgcgggaaaatatagatcccctcagagaataaaaagggctaagctgggatttgggttacattgcagggattgagccgtcttgattgctgaaacagtgcccctctactccaacttgagccggacattttcaagacaggtccacaagctgccagttataagatggttattcaagcatcttttagacagtaagtaaacagataagatcgtgttgtctcgaacaaaggtaattcgtagaagactagttgcttggccatcattacacggtttgtgtggcaagtatcataccatattggtcgggtctcacccctggtggataaaattcagtttggctcggggggcgaaaaaggtaccaagagcggataccaatatagttaaggcatgtactttggctccgaggggacaatcaagtgtgcttccgagtggacttgcatcgaccagaatttgtgagaattcgcatgcctgttctgtcatgtcctattgcgataggctcttggtgcctaggctcctatccctccttaaggactcatcgcgttgggtgaatgtaactaaaggtgtcaataaagtgagtactgtactgggtgatgctccaataacacccgctcctggagaatctagcaagggagccacagcaacgaggcgtcagcggccagaatcatacacgtacaattccactaatcaccaaattccccgccttgacccgccgggaaagcgatagccacttgttcccctcatcattgctcggtcatttgcgccgggaagatgatcgttgccgataatgtgcctaggtataaatagtataaatagtataaatggtataacctaccctaacagacaaagattcaggagcagcactggatccgttctggtgataatcgaacaaagggagcctctactagagtgataaccgtgatgcattcgtccaggttcccagaccttccggggtctggatacccacagatgtcgaccttagcgagggagatccctatccaattgtccaagaaagaccaacaacgagaacgcaatcgacaagcacagcgtaagcatcgtgagttcttcttcttttcgacttttcgtgaaagagacctcatcgagaatctctaggtgaatctgtcaagcagcagttggaaaagtttgatcggctacgacaatgtctccaagacctagatagtggccctaaagcctcgaaggatctggcaaacctaccgttagatgaacagcaaaattgcccgtcgccatcggctggtgaaaattcctctatacccgttcaatcgatattaccaagcgtcttaccggaagtcgatgagcccataaactcacagtgcagagacccaattaatatactcactcgcccattcattgcctcaactggatataccaatggattgtgcagtcaactatcaaaatcacacgatggagactcttcgctagcgagctctcgagtcgaggagcactatttaatggtaagcccccttcccttctccctcttttcccacaacttctgatttcactagaaggctgatttgatttaaaaaaaggctttccctccaccagatacatcgttttcgctggacccaaaccactgccctccgctagagttagaatcgaacaccagggcatgcaattggcgggctcccggtcggactttgttgcaccagggcgtgtttatggatagcgaagacatagttttggtgttgctggctcaggttgcagatgtggaagctcgggaccatgacggacggacacctcttcacctggctgccgctctaggacacgcaaggatagggcgtttgttgctcatgcatggtgctgcggcgacgctgtccctggaggatagacatggactgaccgccatgcatcttgcggttcagaacggccatgcgccgatagttgaggatttggtagagttcggcgctgatgtcaatttgcaattctaagtagatggtagtgtgagggattcggagtgggaagttcaaaaacagtcgaagttgaatgataatttagcatcgagcgacaatcaggtttctttccatcttgcctctgatgtatcgcccggtcacaaattcctatttccgcagataaactcaagttgctcactatgactcggacgaaagaacttgttgacttgtctcaatatatgtatttctcgctccatatttggatctagttatgtagctgcgcagtcaaggctggtagagtataacaggattcttggggatcagctatccacaatgcattatcgcggttgcttgcctgggttcaggtagatgcagacttaaggagttcttgtaccatgtgtatgtaggttgtattattgatggagttatgtgggtcacgacccagtattacatatagatacaggtctaaccctaatgcatgagtagtgcgtatcagggtgacaggacaataccatcggtacaggggatccaacaggagtctagttataatcgcggattggaagaacgttgatccagtacttcacaacaccgagaatccccttggcattggcacccaccaccttcacatatttggctttgcctttgagaccatcaatacgagcgccctggtagtgaaaacaaaagacattattgattgaaagaaagagggggcgaacagataagcgcatgagttgcataacatcaagaaatgtctccggtttcaaatatacaagtcttgtccctgctaataccgtgacaggcattctcggcgtcggaacggaaagcttgcttcctgtgagccttgccgcaaagataaagtgcggtgcgaccatgcccagcctgtgtgtaaacgttgccagaaacggggattcaccggtcggtgtttctaccatcctgcaccgttgaccagcaccagaagacaaccagatagggatggtcaaattcacttgtatgtccgcaattgcccgcagtaggaatatcaactgagcgcaaaaaaatttataggtcaccttcgccttccttgggaaacctgggcaaccccatgtctgactctgaaacgcttgacgctgtggcaccatgcccgtctgttatccagccagcacttcgaactgaacagatgctgccagcagggtacttgggtccgacaagcttcatcgcggggcttgaggagagcgttgatctttttacccatggtgaacaatccaatacagatggacgagagaattcagccatagctccatctcccgcgttagtcaagaggaccgcagaggttcttcgctgcttgcaacatttccctgctattaaaaacctggtccataaatactacagcgtctctcaaaccgctgtcatcccgtcaccatttatcctcaacgcgctggacgagctggaggtcactgttaacggaagcttgtttgggtcagcgtccgatgaacgactgtttacattcagcacattcgtaacacacaatactagcaaggccttgcagatcccacagaatagcgacgggacagtgtttcacaaatattttactggaccttttcttcgcttggagatcattggagttatatgcgctctagcaggccgggccagctacttcgggctagccgacagtacggttggcgataccgagtcaccaacccaattctctcgcaaaatgttggttatatgtgatctcactatacatatatgcaagagtctaacggctttgaatgatctttctctctggcttgtccacgaaaacctcctcttgtcgaagctgcttcggggtgattctagtcagtcatatttactaaccctacacgaatcccaccgctgacgagatgttctacaggttcagtgacatggaaccgcctaggtgaacttgccacgggtatatttgagtttggtgcgcatagggacacccctagcttagtaccgcttttcattcttgaatcccgacggcggctctttgcagcttcctatcagctcgataaaagtattgcgactttccttggacgaccgcctcgcatttcatggaggcactctgattgccttcttcctcttgatatcagcgatgaggatttagctggtcacccccatacactggaggctgcccggcgctctttagatgctaatggatggaatataaaaaaagtctatcagccagcatcttggatacgactacgatttattatcagtacattccgagaagagattctggagctgtcccttcaaaagttaagtccgaatagaacggaaaaattgcggtaggttgaagtcgatgtctgcctggagtcatttttgtctacttgatgctgattattagtactagtgaggtttccagtcgctgccaccaggcttggggtttgttacctgaacatctccaatatacctctagttgttgggagtccgaccttcctataggagtgaagttgatatcgatcatttcttatatcgcctatctttacaatgagttctcaatccagagcctattgtaccaggattctaaaagaacggattctgcgctactagacgtcagctctgaaatcctctccactatattgaccctgggccgacagtgggagcgatctgttgacatcaagggtgacttcacttggatcgtgagtagattttggctacctaatggatctcaacttatcttcttttttaggctcttgtttatgggttttcatgcgccggggttttgatccgagcaatgcaggagcaagctcgaacgggccagccattattgtattctggatctcgatcctccctcattcgcaacctaagcgtctttatctcgcacctagagtccatggccggtccggaacaggcgacatctccattgttcatccgtgcaacgtcggtcttctcgagtattatcgatggaatattggagccgagacgagaagttcccgtcaacagtactaaccccgatactatattgaattctgatattgaaacgcccttcctttttgatcttcaggggatggacttgtttgagactcaagattttcgagttgcctttgatgatatgctttactaaagaaggctgtgagctcctagcaacccatttagagacttttgcaatttcctacaaacagccactttgctctcaaattcattatgttttcttcgcagagtcttcagcgagatgcccttcgcttcactctgacactgtcaggtgatgattaggaccaggagttataaataaactatatataactgtaacctcaacaatttctttattaattctttcatcaatttatctactttgttaccatgccaggcaccataccaagcgatagaaggcaccgagtcccttagacgtggacgtaggaagacgctaccgaaatttcatataggagggatcgatgtagcacaaccctgtaaaactacatatgtacgcagggagagggagagagaacgctgacagaaattggtcaagtcttcttcctaatcaatcttgcactcgaaatcgtccttgacctggtcgcatatgctcaacgtctctgcacgacttgtaagtgagtacactgtgaacgcggcaagccatggcgttgtgctgagctgtgggtcttcgataatgtcgccttttccgaaattcatgataggatccatcacacgggacatgagggttggacttctttccgcaaggtctttccacggatcatcagaggcaaccacaccggacttttctgcttgaatggctgatatcgcgacatgacgacgagcctgatgaggttgcgacaaggcgcgaagcctatattcgtccctaagtgcgatcagaatgtgaagtgcgaacaaatcgaccccatttgtataagcagtagcacatgtgtctacatagcctggcggtctggcgttaatctcaatgagaaacacgctggcatcatgggcggggtggatagggttgggacgcaaatccaggggttccccgtcgcctcctggctggtattgatgactggaattccgcacccgagcctccacgtggaaaacgccggagcggaatccaaggcgcaatatagcttgatgtagagccttctgaagagtagcaacttctgacggtggaagagtagaggggaacacatttagggtctctttgaagttgtcggaatctgcgttaccttcactcgactcagcggtgcaaggaaaattatcgatcacctcaaaaaatatgatctcgccgcgcaataagacaaaattgcagtctacctctggcccgtcgcaatactcttcaatcagaacatcggtctgccatccagagtcttttgagatttccccggttctggaaaatgcggtctgccttgacactttccccacggcttcgatcagtccctgcaaggtagtaaccttatggacgcccagactatgccagccaaagcagggtttgacaatccacggcgggccgggaggaagcgcatttctctcgtttgatgttatttgtgagatgaggccatcgaggctagagaccaaacggcatgagtctggactgagttccgaacgcgtgttgtgcttattgacagatttggcaaaagactcagatggagatgttggcagaccgaggcactctgctgcttgagcgaccggaatgagcaggaattcagtcactgtggtcaatccatggatggggcggttgtagccttggatggcgttactgatgcgacgcgaaagtccgtcgtccgccgtcatgtcgatttcaataaaagcttctctgggggctagctttacagctcctccttttcccagccaatgtccgcgtggccctatagccacaaccttcactccgagggcatgagccgccttgaagaatcgccaagaagcatttatctgacgcacttcgccaaccacggccagtctgcgcatgttgatagactttggggaagtccattgaagtgacagttgctcgatcagctgtgattggatggtattctccagttgggtatatgagtccccatcatcatcgatcaagatacaacacacggctgctctcaggagttgcgagagaccttgttgagggaattgaggccaatggacaaactccatgggttcgaccagccctactaccttatgtattcctgagcagccacggagtcgttcctcaaaaatatcatttcgaatcatgtaccctgcttcattgggtatgatgaatttgagcaatttctgctcgctttgaacatgcgataaaaagcttgagtcggtattcatgcatgcaaatatcgaatcaagcttcgtacgcttcatggcaattgtgatgggaacggagttagtgctcatcactagtagcgactttgctcctgagaccacgacttggcatttttcaatgagctctggaggggcaggctggacaagggcagtaagaatgctgcattttgtaccgctctcgttttgcatatgctgaaagcctatagttgtgatcgtcatgtagactaggaattgttagttatacaggacgaaacaaaaggcgaaaagtacactaccatcccgcacgcgatcaaaaagaatacagaaatccgaagacattgtggttattcccttggacgtgttttttttttcaaataattattcatcttctgcatcaagggcttttgaagttttgttctctgggatctatcaacacccaatgtgacgtcgccacgatatccgaactccgagtttgattccgatcacattttcagcaaatcccaaggtactgtcaggttatgtcatgtcatataatgactgtgcattaataaagtccctgtgccccataattcatttcgtcgttttcttcatgagcgaaaaaccccgtcattgatgaaaaacagagaagctcagtccgtatctatgtcttcaccaactctgcagggtcgcatagccacagaagacgaaattcgcgatttacagcatgtcccagcgcatcttcctaagcgagtctggttggcggcgactattggaatggcggagcggtttgcttattatggaacacagaccctcttccgtcagtatacaactctcaattacctttgatctctctgttaaccaggataaacagaaaactatctccagaacaagccaaccgacttggtacctggggcgatgggactgggaaagtctacagcaaccactgtgaatttagcgttcactgtgttggtaaacatcctaccattgccgacatccgttcttgtagatggagtgttaggccgatatcgatctcttcaaatatttacgtggttagttgatattcttctgctttgcgctctcacccattttaactgactgatcaatgtctcttgtacacctgcagcatctacgcagttggatccacagtcctttttgcgacctcctttccttcggaaatgaagacaggtatctcgactcccggatttgtggttggggcgattctcattgctctcggcctcggaggggtacaagcatccatccagcctttcatcggtatgagctagaaagcagaagcagagtgccttggctgattgacttgcagcggatcaatacaccgaatcagatatgcgaatcagaacaaacaaacaagggcaaaaagtggtggaagatcgcgaactcaccatccaatacatctacaatgtatattactggtaggtaggaaggagagacatatgaaggggtttagctaatggacttcgccggtaggatggtcaatgtcggttcattaggtagtgtcgccactacgttgatggagaaatatattggcttttggtcagcttacttgctggatctttgtgccgtggctatttgcgtgttggtggtccaagtggcgaggccaaaatttggtgcgtttggtggtctatgtcgcaaacgctgacatgtatctaatcgctttcaccaactagtacacccgcctatccaaggctcaaagcttccccttgctgctcgctgcctatggtgcgcagcgaaaggaggattcaaactcgatgccgctctcccggagaaacaattggaggtgcacggccgagtcgttccctgggatgaagagttcatcgcggagcttcggggtgctttgtcggccttcaaaatctggtgagtggtactgagttacaatttggcggtctatgtcggtctactgacatgagtagcattggttggccaattttctgggtttgcatgggcgaggggtcccaggtatcaatctctcaagcgggtcaaatggagacgcacgggatccccaacgatctcatcaaatctgccaacccggtagcctacgtcttatttggagttatagttcagaagcaactatatccgttcttgcagaaacgcaagattgtcttcagcccggtcaatcgcatcacgcttgggtttgccattatggcaattgccatggcatactcggccgttgtccagaatgcgatataccaggccggtccgtgttactcacgtcctcttgcgtgcgacgcatctcagggagggcaaattccaaatcatgtccatgtgctcctacagcttcccacctttgtgataatcgctattgccgaggtattctgctggccaaccggctctgagtatacttattcgcacgcccctaagagcatgaagtcaatattgcaagcgtgctatatcggaacggcaggattaggatatctcttaggcatggcgttgtccccactcgccaaggatcctctgctagtcgtgttgtggtctttggtcgctggaatgatgttcctgacggcctgtgcatttcgtgttgccttccgcaaatattagatgacaatcaggatttggagtcgacagaacggcagcaatagcaagtgcagccaaaaggcatggaaaacatagcatttggttctagcttctgtggatgatagaccctttgggaagcagtcttattagagatagaacatatgtggcaagcttggtcctggcacggtgatggttgagcttggttcagagtgggatgaacagttggcacatgtattgaaccccattttgctgcagtttttgattgcgggcagtctaaataatgaccgacgtgtgtgatattatttttcatctaattaaacggaagcctgaagtaaagatatgcaatctacacctaattcctagactccaggagcagatcctgctctggaggtcgtggatcatccgctgagcgtacttggtggtgcaaccaatagtgctgatagatgaagaccatatcaaaagggatggtcgcattaccaagatcgaaagacccgccgtagactgccggcgataattcattactgcctacggggtgtgcttggtcgttgccagctgtaggcctacattgaatgactcggcgaaagtccaatcagtatatgagaaagtgataggatgcatgtacttgctcaccacgtcaatccattctcgtcaaggtcctataggaataaaaatctggcaacatccgaggcgagcacggcaagataactcccggattctaccaaggtcaatcgacttgcccgttgcgatttagatttgaagttctaaagccacacctatataataggtgactggagatcaagcagcagatcaatgacccatgaaggacgtagacgaaatcgttcgattgaacagccagtatgggctctaggaattacgatacgcgtactatgctcaaacggtactgggcaaaagaagcagccattgaatcccgtatatgcggttagaccggaaaggcattaagctggacgaagacgaatgagaagccgtcggttgaccgtcggcgatggttgtggatcacttgcgggtagaagaaaaaaggccatagtatgagaaagggcatgcaacctgctgacagccatgtctcggaaattgacataagagaaaagtacatttgaacttgtagggagtcaacgtttcggaataaacacggggttcggagtccggagttcggaactcgtcaaacttggtatgcttagctacgtaggtacctaggtataaccaataacggacttaataaaaagccatcagtcacgagtggataatcaagtgactagtgactacatgcgtctcagagagatctacgataagacaaatttggccaaggctgcacagtcatttggccattataaaattggtagcttatttggcgcttacctacagaatcatatatcataacttcttcgagttctttgagaagagaatttacgcccatcaaacctttcctggcgcctcaaacttacttgcacttagcagcagactcgaataagatcattttcatcatgctagaaaagccagcattgcagcgattcgaaactttacaacttcacgctgggtacgacactcaggccactagttccaaaactagcttactgatgcgttgaaatatagagcgtttcccgatgctttgaatagctgctcagttcctatttacacgacggcagcatttggattcaacaatgccgagcatggcgtgcgtctcttgaatgttagcgaattcggcaatatctacagccgtattaccaatgtaagaaaatatcaccttcctctacctttaaatcgcagtatcagtctaagccctacctcttatttcagccaactgttagcgttttccaaaatcgcatggcagctcttgaaggtggcgtcgctgcttgtgcagtcgcatcaggctcagccgccgtgtcgatgacactgatggcactggcagggattggtgacaacattgttgcctctttccatgtccatggtggcacattgcatcaattcaaagtgctggctccacaattaggtattgagtctcgatttgtcacctcaaatgacccggaagactttcgatccaagatagatgagaagactaagttcattttcgtggagagcattagcaatccgaaatatgttgttccggatctcgaagcactcgcgaaaattgcccactcaaagggaattcctctcattgtcagtatcctcctattaccctcttcgcaaactcgcaccagactaaacgagattccaggtcgataatacatttgggtgtgccggttacttctgccgaccaattgatcacggagcagacattgtgctccattcggcaaccaaatggatctgtggtcatggtacaaccctcggtggagttatcatcgatgcagggacatttgactggggcgctcaagacgacaaattcccgcagttccatgtgaatggtgccgaagagggcagtggcgaactaagtttgtggaatatgtttggctcacgcgcctttgccatccgttgccagttcgaggttctgcgtgacatcggtagttcaatgagccctcaggctgctcagcagcttattatcgggttggaatctctggcggtccggtgtgaccggcacaccagcaataccagggctctagctacttggctcgagcaacagccgtcggttgcttgggtccgatatctggggaatgaggaccatccgagccacaaaaatgcagaaaggtaccttcaccgtgggtatggcggggtcttttcatttggaatcaagggtggcaagcaagccggattcaaattgtgtgatgggcttaagctgatcattaacaccgccaagtatgttccatctgtaaatcccccatctaaggaggctttagctgacaaatatgtacttgatagccttggagactcaaagaccctcgtggtgcatccctggacgactactcatcaacagcttactgatgccgagagacttgatgcgggggtggatgaagaccatatgcgtctttctgtgggcatagagcatattgatgatctgaaagatgacttctgccaagcttttgcgtcgatgaatgagactacaaaggcctctgccaattcagttaaacagaattctcacattgaagagcagaagcgaatggtccggactttatttgggtcccgcgatcctttgcccctttccgtacccagctagatgatagaatggatatttttgaccgaccatggtctgttggatttctcctactttgtagactcaaagcatccgctaaattcaatactctactgttgggattgaggtcatatgaagagaccagggtggagactcaggcaagcacatggtatatagtatgtgagccaattttcctaattaggactgattttacagcattggtgaccaattgtttcatccagcaaatcctccaatagctcgattggtacccaatatcagtagaggttcgttgtggagaaatcccagaggtgctgccggggtttctacactgagcgcacgagtattttatttttatttttatttccatgcttaatgcggcctacacaaattctttgatattgtcaaatacgacgtctgcgctcgaaataacggcaactaacgattttgccctttccttcacatccagggagccagtcgtcgaagcaaatctcatcatgcccgctaccgctaatgccccatttagatcaacaatgcctcgtgtctcttggaacgtatctctgatagcactttgaatctcacatgctttcaccatgatcacatggtccactacatgcggattgactcgtgaaatctccgttgtcaacgttctgtcgaggtgatcgtggctgatgacaggtagattgtcctgtcctgttttcaaagcgtttgggatatgtgtattacattccgcattcggtaaatcaatcggaaacccgtagagcttcgagagctccactgaaggtagaacgtcgacgccgataaccttcacatgtggtgcaaattgtttgactgatagaccaattgcttcgagggcacctcctgctcgggcgctgcagaatatcccttccagctgttggtcgtccttgacttgtctgagaatctctaacgccactgttcctagcccggccagcgtgtaggggtcattcaggggatcgatgtagagagcctgcacgttgaacgcggcggagagtggacctgatggctcatcggaaaggtgttccacgacagatcccatttgttgtagctcgtgcacttcatttgggcacatttctggaccaactaaaataactgctggaatattaaggagacgcgcagaatacgcgattgcacgagcatattgtcctggaagagtccaattggttaggtttaagtcatgcaaagtagcatagatcttcacctttggaaggaatgacaacgcccctccatcgattctcaggtgtgatgtgactcatagagttgtataggccgcgtacatgcgggctgaaacttaattgctgatcctcgcgtttgaggtagagctggaagtccacatgccgactgaggttgtgtgctgggcttaaatctgtgcttctaatcatgtcatgtaccctagacatgactattaattgagcatactatatgtttcattaacatctaagctatagttctggactggcatacatacatctggatttgaacaacacgcgttgtggacttgcgatttctgtagcatggtcgagagcaagacttcacccgggtcaagaagacctcaagtcaagactgagagcgtgacaacaattctttttttaaaaaataaaagaaataaaaaataaaacgagagcatgtaagaagcaatattcccaaactaaattagtcgcgagtatcgaagtgatcctcaagtcaataatggaattagggtccaatacaatcaattattgaagccagtgtaagctagaaaagtccagctagtccgggaaacaggggcgtctcagccgtacttactgtactgcccaatgcccctcggactagctcgatattaactgcacagtcaggtgtggacccattgaatttagatgaaacataacacgtgaagacttggctaattgcaatatgtgcgattttctattgctactccgtacagtacgatattcttcctacctcatgatagctgccggatagcaagtccatacgacaagagatttcagggctattatgtgcagcgggtctcgaggcaaaccctcataatgggatatgcaatgtcacgtcggaacgtgatctttacgtttataaggcgcttttatgtatattaggttaaataaaatatccgctattatacgtggcccatatgctcaattgcaacttcaagaggtggctgtgtagcatcaggattgtttgtggttgcactggcctctttcctcggactgcccgaatgccaggcctcgcgaaggtacgaagatattcctatgccgggtcagatggcgcttttgaaaaatcttgttgacctaccgaggagttttgtgagagcctttacactcctatgggtatcttgcgctcccacacacttgaaggctgcatctggagacacctcttcgtggcgctagagataagtactcgataatcgacttatgattattaaggattctaagaggtgcataaaatctgtttactgccttctctcatggcctgcatgcgcacctcggactctccgtatagaagccgaacggcgtagcttgttcctcttcgctgtttgcgtctattgactgggtggtgatataatcatacatcaaggaaagctgtccagattccatatcaaactttgttgtacacataaacaacacaagatcctggcccctcatttacctgatattctaactagcacttagaaaatccctcatcataactaaatgaaacctaataggtcttcctaggagctctcagaccctccatgccacgacaatatgattggtgagatgagtatagatcctaggagctcgagtgctggtgcccatttgcggggactgtggccgctaatgctgagagtcaaagtatataaaagaaacactgatccctcctagagtgaacgtatccaggtttcaagcattctcctcaagactgctgctcataagttcaagcaaccgtcggcattccgggtctgtcccctcagccagagcaaaagcctaacgagtatgcagatttttttaatgccgcaaagcaaaccgacaacctagtcgatatccaatgtatccatccgacgagagttgcaagaccgtttcctgcatactcctgagctctgagtttgttatatatggccatggcctaatgggaagatgtaagtgactctcactattgtaccagggggagcgcgaaaatttgcagggggcctgtggctgactgaatttagtagcataaatctactgaggttggagtgagaacagatcctagcttgatttctcggtctgattacacgtactaaaacctacttcaattgtacgtgctctttttgtcatttacctggacgcaaatggtgtgcttcctccgattgagccgaaccaacgatagccccttccacgcaggtgagtttgatccgcgacgcctgttcttctccaaatgtaggcatcgacatagaccaatgtccgtgagatacctgagccttccttcaaacatggtctaaattgatacttgtctacggtaaagtagtagtggttcagaaacccaaaaggctccaggttagtataaaaccccagaaagagagagcctgaagatattaagaaatcacatgaaaataaaacccgaacccccccccccccaaggcggcctctcccaaaccctcaacccaccgcctctgctattgagcatgtgtgtaccataatatggctatatattatcggtcacgtcatttcgcctgtatcatcccacctgaattataggcatctttttgctccctggccctaatttgtcggaccatgcttccatgcttcttcccgccatcgttgaacttgagagccttcatccacgagtcaagacatccgagaaaacaggaagagctcttctattggagcgaagactcgccatcttgattcgttaatgtattcaggcttgacatggcaatcaaaaggcccgctgccctctgcatcctagcttcatattgcagactcggaacctgttaagatactcgctagttgtcttattatattgcctatgtttgccaggtcgatactgttggtctacacatgtcaggttcagtaactgttgcagatttgagcctcgtacatatcaggacccaagccgcattatcgaaattatatctgcactacctataggaaggacgagctcgttaggtaccagctggacttcaccttgtaaccctcaaaatgaataaccgaccttcttcgaattactacaatgacggatatttctagaacagccaaatggcagatatatgggcaaggcgcgaaaatatacttccaggtactggattatttcggcaaagacgagaacgttggaaaatgtgaaaagtgcaatcacgacttgagattgggtagtctgaccatttcgcaatcgcttagtcaggctgttctgggttcgtactcggtacaattgctccttgattaccgacgtaagataattaccaaattcctgtacagcccgcacagccacctcttcgagacaaacaagccacagtacctgaaactcctgcaatacctgaaacaggtatggtcttgtatgataccgttatcgtacagtgctgttgcagataccattaggtgttttacgactcgaccgcgactctatcaaaattgttgaagcccaaaattttcttgccgatagtactactaattttggaacatataggttggatctacactatatatggatcaaagaagcagagggagagttatattaggagagatggagcgagctcccaaacaactaacgtattttccatgcgagctgcgcaccctacccaaaacgcgtccatgaattagaactctgttagcttaaccacccaccgtggcaccaattcgctcttgaattcaatagagaaagagggtaggaccttattagttattatcggttctgagagatgcagtatgcgctagtaccggaagaagccaatgaggccattgctcagtacttgagatgtgtatttctgtatagttctatctgcaaatttaaggggctcgtttaagctgattaagcagttgatgccttgggaatcagggagcagtggttgttgaatgaaatagactacactagtaagattcttctccactttgaccgacagttatccaggcttctaagagtcaagaaattagcgctattcgcgaagcagcacgccgttttaaagtgcttagttaaggaacaaactggaagccagagatgtcaggaaccgaaaagtcgcactaaaatgactcacaaaagctcacgatgcttaatgatgttttccgcacctccatcatgttaagtaagttaagtaataccctgagcccaaatacgtacagtgtctccagtcgttacagtacagcgattttcgaaaacagtttacccctcagacacacggtttgtttctcggctcgtacccgaaaactgcgctagtccatatatggctaattcaaaactaaccccagcttagctgtatcgcagtatttaatgtattgggattctgcgtcaaatgagtcgttgttaattaccgtacacgacaatggaatgttctaggaagacagtcgcaggcacaacggcaatctggcgacctggcctgatccatgcccactcgcttcttcctttttctccatagctgttactgtatcgtctacatcaacatacatgtcgaagactccgtagagtactaacttggtaggctaagttggttctcgtttatgctccccatagcacacgtttcctatcgcaactctcattcgtcattgggcttgttgggaaagccagtaccgctcactcatgctgacaggcctccaggctttaatcgtgtgtagatatgaacggcagccctaccatgatgattacatctctcagccccaagaatacgaaccatgggaacaggattcacaatattcgccccctaccccgggatacttccgaagcccatatgctccatcttccaactgcagcccttccccatccaccccacccgagaatgatcgcagctccgcgaggcaacgacctagtacactgcctctgctacaagaatccgaatgggagccagaaaaagcctacgacgaggatccaccaaactgcatccattatttcatagaatggcgagtcacccttaacaagaagaccgttgttaaagacacggaagaagatcttgtattggccccaggcgcctactggaagttgttcctggaagaaaagctacagaccgtcctcctagagaaagtgccccgcgacaaaagggtcagagttgatgacacggcaatcatggtctcaaacagcgaccgttcccagcgtgatctgaacaagcgtttcaacaaaactgaaatagtttgggcccctattgaaaaacaactcaggatgtggtcgagtcatttctgccgtggaaaaagattgactttgagagtctgtttcaattatatagaagactgcgattccccacccaccggacgaaatggtgaaaagagagggaaatcctccgtcacgaagcggatgcttggcgatcgcgatgcccagctggatgccgaagaaaacgcatgcggacagcaatctatttggcgccgtgtttatgatttgatgaaatgcgattcagcggcatgccacttgggcccttattgctggctagatccgaagggaaagaagcattatcgacttcggacgcaaacgctcagacgtctggtcacctatgccgagaaaggtggtatcctggagacgcacagggacgtcccggatgaaatccgagatgagctctacatggaagaacagcagagggaagaaaaagataagcgcaaaggcagtaatattcttggcagtcaaatgtcacatttgccgatcaacattaatgttcacccccctggagtggccacaacggcttcagctgttgtgacagctgggcaaaaatccgtgagttcgttgaagatccctggtctcaaggacgtggccgtcaaagaatatggtgagtggcttgcatctaatgtatctgatgatactctgaaagctgcatttcgacaagcgtgtggtataaccctgtctgatggctttgagcttgagcacatctacaaagatcaaaatccggaatttttcgtcagcaaaggaatcaaacccggaattgctcggagtttcgtagaaaacattggggattgggtcgagaatgtgaaaaaagttctgcctgttctcgagttggtgtagacaagctgtgggagttgcctgctgttatttggtgtttttctttcccgctcagtttgtatgcaactctggaatatgaagcacaagtacgtcctttttttgttcgagataattttagtgtgaattttgttccggggtcaaattagcggtaggacaaagtgaagcgtggtaaaggcccccatcggatgctagcgatgtgacgttccgtgggcccgggaatcaccctgttttctcgcccaacgagtctgttcgtcaaaagctcgctttcttcccctttcatatgcctcaggccccgttctcgaagttctgaaaagaagtcaaaagcagcgtcgaacgtatcaggatatgcaagctgtgtgccagatgcttctcccataatgatgcattctgagccaacggcgttgtttgatgtggcactccgatcaaatattcgacgcacgggaatttgaaggaagtctcgagtctaggttgagcatgaactagccgcccttgcgattaactggtttcaggtgaacttacaagcttcatggtcgcgactccggacgcagttgtatagaacgctgggccagcatttggattgggtatacgagcaagcactctttttccatcattcatgatcaaacggaagaccttgttatatcctccttcggccagcttcgttatggagatgcagctctctgatcgaacggctttggccgcgaggctttgcagctcagcaaggtaaaaggccttatccctgtccctgagctgcttttctccatctcagaaccatcatccactggtacaacagaagaagtgctcgtgatcaggatttggttgtcatttggtcggagagactcgtgatcgtgcgaacgatgcgaaacggaagagtagtggtcgtagcttgaaaccgagatggtgctgaaaagaagacagacttccgtggttgaaaacaacaaggtgaacagtttctcaaatttggaagagctgaaagtgcacgacgtcccatgacaacgttcattgctacatagtgtccggttgagaacagtcccaaaatcattggcgccaagggctgggtgtagccgcctggacttcttggcgcttactaagtcacatcagccacagctactaattttaattttgaaacagcatgacgattacaaccgtatgtacagggatggatgcatgtgacggacatgaaagggactgcagtggtggtggaatggccttagcacatcatttatttgatgttggtcattatactgaccgctttgaacgttcagcaacaaattgcggggccaagatattgagtcaaaaatgttattcaccaccgacggctgatgatcaaagaccgaagacttcgaccatagtttcaatgttgtctttcgcacaaaagcttctacctcctacagtggggtcccacagtcggaaaccagtataatgtactgtttctacctcccacccatatggtcggaacagaattatactaccttctaaatgcatagaccgtccagcaaaggcaaattctaagtgatgtgtcccaaatctcacctagcgtgttattagggccgtaatacaccctgtcctatggaatgccactgtacctccacgtccctcggtttgcataaattgaatgaaactggtggcaaagaccgcattctcaaacatcaacatagtatcaaacaatatgttggcgcaagcacgcaagtaaatcaacagcagtgcatggcgcccagagatacagctccatggcgatgacaataatagaaaaacacacccaaacatattcacgaataagaacttcccaaccatttttcagatagcgataccagttctgcactttcatggttctaaaagcatccagtatgctaagacagcgtgtcccatttttggctcggcctccaaaactccggtcgaagggtacaacagtttgttcattctcgggtagcatcgatgccgcaactcttacatacatagctcctgttaaaatcgaagccgagtattccgacacaatcgggattgcatgaaagacgatattggcgcatgttgttagtggataaggtattctttcataagcctggttactcagcgcagcgaaaacaacgccgcggaagaaagccaaaagggttgttgcaagatagtgaacgcagttcggcaggactatatccagaaatgcaactggtagtatttcgagccattctcgccagccaggaattctctgccaaatcgtctgttttctgggttttgaaacgacggtgtgaacccaagcagcgtggaggttcgttagagaaagtcccaataacagccttgataagccaaggacagggaatgtggctccgtcttctgcagaaattggtttagatagagccatgatcacaactgtcaaaagcatatatatcatgaactcctcgaggccagtgaaaatgaaccaaaatcctctttcgttgtgcaagtgccgacgagcaaggcttcgttgattggtgacagcattggatgtagtcgagatagtaaaaatattgcccatgatcattatactgccgcatattaaaaagccagtcactatgttgtttggatcactatcgatgactccagcgagcgataggacgaataagccggcgaggccgagaaaaccaccacacagggtaggaaatagttctcggatggagttatgtctcaggctccagaggaactccctggcattctccgattcgtcccttgttgttctaccacttcggccggtaggtggatcctcgatttttccaactacaaacaaaccggtctcttgcgggttttcgtcctctatggaagttggggtttctaggatagccagggccgctatgacgcttccatctgtgtattcgaactgaaagaccatgctttattagtgtcacgctttccccaaaatgaacttagcaggatctgtcaggtctcaccataaagagaaaaagtaaactaaatagtgatgtcgcgaccacaatcgtgggcatctcggtctggaaatccgcgttggagaaccgcacgagacagaacagggcagactgccaccgtgccagggatcctagtggcatcaggccgaacgatcacgaatgagataaacacttgagggaacaggtcgtcgtctacagcctcgctgggaaggtagggatgctcgagttaaaagaggagatgaagactaccacagcccggatgtaagtggtaaatgtggaagaaaaaggtgtggaggggaaaaggagggtgtgggtcaagccacatcgctagatctcccacatcttacgtagacactctatggagatttacagtattttacaaagactcattgagcgctgagatctaatacgctaaaagacacgatacggtcaagcagggattgtttatagggtagcctattatggactagcttggtttcagatacgggccgaggcacaatccatgtgttgggaatctatttcccactttcactgtatccctgcccactctccagtccctaatacccccgcggccctaggtccaaggcattttttttatttttttattcaaccttctcaccgaagtaggtgtcctgcgactcggaaaaatagaatgatccacctccactagtctgtcaatagcacccataatccctaagcgcagccctgtcaacatcgagagttcatttatctatctctcattcctgcttaaaatggcgcgtatccctaatcgatctgcgacctacgaagaagttcgaatttacattgcgcagacccttatatccaagtataatgcaggccatgacttcgcagaagatactgcccgctcgtggcgattagggcggggttctgagctttatgatgcgaaattggaatattttcaagaggtatttgggatggatacgggtctctgtctattccaaagtgtctgtgaggatagagacaatgcttggaagcagtcagttattggagttatttgcttctgtaggttaccactgttcagccaatacgaattatattgatcgctatatgctagggatgactattgtgtccgctgcgttgctcttttggtttcatatcctaccattacttcgcggccaaacaggctgtaagtgacttgtaacagctggtatcctatattatcagtgtgctaataatctctttgcatagcaccttcccaattactcctttttggcttaaccagggcaatctatgcttatctaagccctaggcgcgatgactatatgctagtgagtggtttgtttagtgcctgtattgcgttagttgctgcaacgcgtggctagtgaatgcactggggatctcgagggacaccacaacgcatgttatctccgaatttacacaatacggaccgtgcaataggccagtatttttccacctacactaccgcttaaattagcgatcaagcccggacgtttctagggctagcatccgaggaagaatgcacagccatgcatgaaattaagaaggggcacatgtatcttgatagtaattaggacgagcgaaaccgaacatctggaccgttatagttgttaaagaaaacaaaagagtcgacagattagacagggagcgggattgcatcgaagcgccatgtgacctacatccctggactcacttgtgggtggatgggggttgtacacggtacaagacggattcttacagtgatataatcaagagcgttttgctactgttagccgataccatatcatctggactaggattgttgagaatgtaagcaaagtagattagaatgtttatacttcaggtcggaaattggttaaatctgattatggatatcgtagtatcacggacgaaatgcagccttgatggggagagagctatttagtgaggtctaacttggcattcaagagtgatagatgagtgaagaagcctcttcggggtaaataagatggaaggccactgacacactcatgtgcatggcattctcgtgtaaaaatcaaaggttgaggctctttcgcgccgtataaaatattatgcctattcttgtacattggcggctataccgtatgaagattggcatgaatcaagttggggttcggcaattaacctccaacagtgtggagttaaaactgatttcgaatatgactgtacaacagtgacttcggacaacaaaaatctaactttgctagatgcctatttccatcaaaccccttcgtgcattcaccgataggattccgtgggcgaaaatattcgaggaagccgagaatacgaccaaacggcagcgtctttacccatcccagagtcatgatcagaagaagaactacagattagacaaaggtgcaactctcagcaaaacccaacaggagattgttatctaagcgaataaaggtgccgcgaacgcagaggtgaaaagaagctcagaaggacagtcacaggattctggccaaatgggtcattgatccaaatgatgtggacgcagaaaaggcgtagaaggacttggacgctcaaggccaacaactgagaagtcactctgttcaggaagtctgttggctgtacaagggaatcagaagaaaggtagatgacgacgatgagacgggtttgaatatacgattgatcacttcatgttactgtattttgtcatatgaaggagaattctaacaatctaaatcctcaacgctaaggcctgcatgccgaaaatggcccctagcactgtctttctttgccccaacttgattaatacacctctcaaggaaagtgctgaaatctcggtcgggatcatctgcaaagtagctccaattacgttttatgaatcctttgagctcagagaaaaattcctcaattggattgagatccggcgagtatggaggcaaatagaccactttcacgccagcgtcggcacacatctgtgagattcgttcggagtaatgaaacgatgcattatccattaccaagacagacttcggctcgggccatctcccacaatgccgaaggagttcatcaataaagtcctcgaagacaatggcatccgttgacccacgaaagacgcgagagagcacaagaccgtcttgagcgtaggcgggcaatatttgatagcgctcgtcacgatgaaactgcgacacttgccgcggtgccacaccgagtggtgaccagcctgtccgtcgaaacgaaattcgcttgtcacatccagattcgtcaacataaacaaggtggtatgactcaaactcggagaggttatgaagatatatctcccgtaactcggcgttctgctccttcgctttctgacgagcagtctttctcgaccagccgttagatacgagggcccttctaatgctagaagttgttgctagcatctgtaattcatcccataggaagatagccatctcgtcgaggtacaggcccggtttttccagcagatgatcaaaaagcgcttccaacattagcggcgtgatacttcgtctccgtccgacgcgatttgggggggcatgaacgtttccaaagaggcgcaagtttctgcgtatatttttgattgtctgttcgctacactccgccgcgtcggccattcgataacgggtaagtgactggccttgtatcatatcactaatgaattgccgcttggacggggaaagcctcggtgccatattactagaactgctcgaatgttcaatgtgtgctgagctggatggatgtcaagggtatggaggggcattcaggttggaatgtattgggatttcatgtaatatacagtataataagtaataaagttgtttggaaacaaaggaatattctattattagatgattattaattactccttagatggaagtagttagcgtggttccgggtacgggccgagaaacaaagcgcctgtgtccgaggggtaaactgttttcgaaaatcgctgtacggtgtatatcgtttcgacgaggggtcagcgtaaatgaattacacacacacacacacacacacacacacacaaaattcattaacgcctggcggctaaaccgaaagggcaactatcactgatctatcaatacatgtcctagtgtacatgtgccttatctccttagaacccatacctggttcctttcagtatatgtcatcgcagctgtcaatatcgtagcgggtcctcgtgagttagtaattctgttagtggactgacttgaaggtgcttcttcaagttttcaacatcctatcctcggcagttgaagcgcgtctaccgtctctggcacaaggtggttggtgtgggttagtttgggggaggttgtcattgtgttggtcgacatggttaagcggcgtcaagtcggtccgtggcgattgcgaatcgtattgaggctcgcactgcttccaagttcggcgcccagttctggtcatccgaaggtgattttccgcccaggaagaaagacatgttgcctccgtgggtacaggtatattgcagcattttcgtccagtgcatagtccacttccgacatcaaaagaggaagtgttccacggtctctcttgcttgtccacatacacaggatgaggaagtgcggcaaacttcaataatatcgactgacatcggcaatgggggaatggctgtaaaggaacatgaagcaggcaatgtttttgcttctgtttcggcttcagagggattgaacgattttggcaaatcttaacaaccggcttttggttacagtaacttccatgttttatgtagctttccgttgccaagaatttcaccaaggttggaatatccccagaaaacatgattatgatgatataaaaaagtaatatacgtagctaggtgggcgaattaatgcgaaattgtctttattacctatctcagatgtttttgtggatgatcttggcgtcatagtaataaacagcggattttctagtcgcgcgtgtcaccttgtaattctcactttagcactttgtacttattgtttggaaaggcgcgatcaaataaaaaaccaagtgattattgtttctgctgctctcaggcgatattcaatacgtgaattgggagcaacgatactcgaatgtgcaggtacgttgggggcgtttcatcacacagggcaaatcatgtcacggggatgggggttagagtgcgatcttgattctaccaaaaagtggttaaacaggggggttaagaaggggggttaagcagagcggttaagaagaagggtggttaagaagagtggttaagaagagtggttaagaagagtggttaagaagagtggttaagaagagtggttaagaagagtggttaagaagagtgtgcagatctagcgcagccaaggataatataaatggcaagataaggcccctcatctagctctaacatatggtatcatccgcaacgtgggggcaaggggctcgatatgctgaactccgcatattccgaactccaggactattccggactccaggtctggtccgaaggtgggaatgcgcatcattcccccttcctccgacttgcgccgttttccctctctccggtcatagtagatgtcgaggaacaattctgtccatattgagccctcatgttaaacgacacatggacgcacacagtctcccaaatcctgggctggacttatttcatcctgtggtcgctgtctttctacccgcaagtcctgcacaatcaccgccgccgctcaatggacggcttctctgtcgactttgcggtgcttaacatcctcggtttgaccgcatacacaatttccaatgcctgcttcctcttttcgccggttgtgcgggcccagtatgcccaaaggcatccccagggcgccgaaccgaccgtccaatggaacgattttgtctacgccctccacggagccctggtctgttgcctgattggcagccacttcctctatgcgaggttctggaactttcagtccaagtcacaacgcgtgagtatcttggctttcgtggtcatttgggcctgcgtgggggtggtggccttggccattctgtacgtttgggtttcagcgtcgtgggaatggattgacgtggtaagaaagcatgcggcgatcaaatcactactagcccgatatgtgctgactctcatattcacataaggtttatgtggtcggcatgatcaaggttttcctaaccgccgtcaagtacactccccaggccgcaatgaactacttaaggcagtccacggcagggctttccattgtcgcgattctgcttgatctgacgggtgctgcgctgtcgttgatgcagctggtgctggactcttcgttgcaggcggactggtcgggtaccaccggaaatattgccaaactcctactgggaaacattaccgtcctattcgatctcatctttatcttccagcactttgtgttgtatcaggaacaaccggcggagaggaagctagggctatcagagcatgatccgctcctggatagtagtgacgagccatagatacacacaatcatatggtctgaatttctccctatgtctgcgacatgtatgaaccagcaatgatgcaacttgtattcgaggtccgttcccttatggagctgaaaaggttgggaagaacgaaacataataatccacctataaataaggcagtgcggaatgacctccagcccatgaccagacgctcgtgcatttcgactaatctatacagtgagcagcagcggtagcgaacttagtagtgagtaccacacgagtcgatgaaaagcttaagtgacactatagctccatgtatcacacgcgaagcgttattctgtactaccggacagtgtttgatatatatatatagtcaagcacaggcaggggaaaatatgttcttccctcatttatggtttgttccaacctcttcaaccaccgaactttcaatccagataccctcaaccaccgtatagacaaagcttcttcaaggatcaccacatcccaccacaggcaagccccggtaagcccatcatgtaagggtaggcccgatacctatggagcggtagcgcccatggcagtggagtccttccgccatttcacgggaaaaaaggaagacactaaaaccttcatcaggttaatctctgagcccatcgattagagagcctggaacagtctcgtttgataggtatgtatcgaagtctttgttgatctagtacttgcgaaatgcaacacgaaacgcacaggcagtaatgaacatcagcccggcaactactgatcacatcacgaccagcaaagagtctctcgcaaggggtgatagtgccatgcctaacaagtaaccgagccctgctgtcccgatataacacgcctgcaagatcgacttcatgctttttgaggcgtgggaataggtatactcagagcccgtgggccagcagaacacttccgctagtgcaatgatgatgaaggtgggggagctgccacagcacatgggtgcggtttgggacctgtccgctgtctgaggccccgcacgcaagggggtgcgagtagcagggacccgtacgatagataaaagcctgcaccacggccgagtacgccatggctacggacatgatgacaaagcctagtggaatccggtccactgcgtggaaggcaattctgcgcttctgcaagaatggatacagctgtttctggacgatgggtccgaaaatcacataggctatcgggttcgcggatttgatcagatcgttagggattccgtgggtttccacttgccccgcctgcgagatggatacctgggctccttctcccatacaaacccagaagattggccatccaatgctattggggttagacgagctctacatttcgcaacgcggattccggtggttgggtaggggaaagtagtcaacgcaccagattttaaaagctgacagggcatcccgcagctctgcaataactccttgtcccagcggaccactcgtccatgcgtctcttgttgatattggggcagagcggcgttgagcttgaatccccctcggacagcataccacaagcatcgagcagcacgaggcagcttagagccttggacgggcggatggactggcccaaacatcattaaacctattgacacagctctatgagaaagatttgcaagacgcaccgaatctggatttcgctacctggacgataaacacgcaaaggatgaccgcacagagatccagcagataagccgacgagaacccgatgtgtttttccatcagcgtggtggcgatgctgcccaaggagccgacattgggcatcctagccggccaccgtcattacctgaagtctccccgtctctgcataatgcacatggttacctaccagtagtaaagattatagatatactggattgtgagttcacggtcttccacaacccgttcgccccgattggtgactctgattcacatctcatgctccgtgtactgatccgctgttgtctgatcagcctcaaggtacgtcctccatatagttgcgcataccgatgaatggctgaacggaagcttgaacccctccaagaccgatagcaatgagtaggcacccacgacaatcttcatcctgagattgcaagtatgccaaggcctacgcgcccagggagtagatatttagtaaagacaacataagtcagctgcgagtagaaataaaagtcagcggcgcgagcctagagatgaagggttgactctagtgagaccaaaatgtcatccggccaaccccaggtacagctcagcgtttccgtcgaccacaaagtctacagcccattatttcggcatctgtcgaagcacttcaaccctcattaagaaatggtaaccgtggttaaaatggggacatgtagaatgtaagcgcgttaagcgatttaattgcaaattcgatgatatgtacgaaccatacgtttgcggcgttgctttcttttcaacagttgatgaaagtggttcaccatactcaacgcacaattttaagaggaagtaggccaggtcgagacttgagtctataggccacaaagtctccaaacaccccttcaacgtcgttgaaattacttcaacgcttattaacgagaccgtgactctcactaccaactgcgcaactggttccttggtagagacgtagccgaaaaatataaaaggagcccgattcccagcccaaaaaaattcaggacttcggtcctcacactccggtatgtcatagtatccctctcttgcctgcgggcttgagagtctccgtgaccacggctgtcgctgccacaagcccagtgatgtaagacttgcgctccctcgctgccacgagccccgcgagtgtaaaaaggtgcttcgcaggataggtctgcgtgaacaacaatcctcgcaggggggcgctgcgttaccaagtgaactccgcagggggacgctgtgatgacaagttctccgcagcctaggctctgcgtcaacaactgtgtctcgcaggataggctctgcgtcaacaactgtgtctcgcaggacaggctctgcgtcaacaactgtgtctcgctggataggctctgcgtcatcaactgtgtctcgcaggataggctctgcgatatcaactgtgtctcgcaggataggtctgcgtcaacaacaatcctcgcaggggggcgctgcgttaccaagtgaactccgcagggggacgctgtgacgacaagtgagacccgcaggagaccgctgcgttaacaagttcctctgcaggagaccgctgcattaccaagttctccgcagcctaggtcctgcgtcaacaaagcgcctcgcagggacatctgcgacaacaagagtctccgcagggacatctgcgacaaaaagaccctctagcccgtgcaggcacctcttcgtggtgctagggaccagtattcgagtattcaagtactcgaagaagcaaagacctgcgcaatatcttcatcgtctgttcattattccgaagggtcatcattggatactagagggagccctagttagatcttcgccaattcaacagccaagatcataaactaacaactgaagcgtcttcagtatcaaatgacgtatttcacattcttttcccttggtagcttgtgatccaatagcttcctcgctacaataggaattggcatctttcattcagatgtaggcaaacagagatgagtgttgatgtgagtgttgatgtgagtgttgatgtgtgttgaaatatcccggttgctgagataataatgaggctgggatcacgtgcatacatatatacctgttcaccagcctacttgtatcttagacaacatgcaacaataacacacaatcaactcccattcataatatgaacactgaggcatcacttatcaatcaacaatgtgagtgttgatgtgagtgttgatgtgagtgttgatgtgagtgttgatgtgagtgttgatgtgagtgttgatgtgagtgttgatgtgagtgttgatggtgagtgttgatggtgagtgttgatgtgagtgttgatggtgagtgttgatggtgagtgttgatgtgagtgttgatggtgagtgttgatgtgagtgttgatgtgagtgttgatggtgagtgttgatggtgagtgttgatgtgagtgttgatggtgagtgttgatggtgagtgttgatggtgagtgttgatggtgagtgttgatggtgagtgttgatggtgagtgttgatggtgagtgttgatggtgagtgttgatggtgagtgttgatgtgtgtgtgttgatgtgtgtgtgattgagcgtggtggtgaatggtcgggcggtgaaggaggtggtcaccgtctagaccttgccatcggtccatgccaccctcagattatgtaagattcctgaatagggggttcaactccaacttctggattaatcggttatttacgtctatcactgtcacccaccgccataaccactggtatagtaggtaatcgatcctaataacggtgtatcctgttgtataatttattatatatgttgcttttatgataaatttattagtgagactagtagacagtatgatgtgagtggatttgtaggttcaaccttttttgtggtcatatatatatatttacacacatggtactcgcatcactatttctatttattttagttcgcactcccaagtttcattcagactagactcaacagtccgctgctttgacaagcttggttcaatccaactcgtccattatatatccttccacccaactaatccgaacacatagtattgtgggacctgtacgtggctaaaatattgtaaagtaaatacgtgcgtcaagggcttgttaacaagcgacccatgggccaaccgccaaccaacgccatgcccgcccatagacaggtggaagtaactcattgcgaatccataggcctcgtgggccgagtcgaggtcgatcaatatccccagacgtagcaaggaggttttcttgccatctcatccacatgatagatgtatcaatttattgattctatctcgtaagccatctctagtgccattctgatcactcggtgaatttgcatacagcccctacttcgattaagctggtcgaatgcaaaccccagactgccctccgttggttcaactatgtataggcaatacatacgctcaagatcagacctaccaggcatagaagcatttataaggaaccgctcgaaataccattttgttggctcaactaaacatcgtgatgcgatagactctgccttcttattcaaagtcatcgcttcagtcggcgattgcaagtcacttaagcctactctactgtaggatggctatatcctagaaccatcccgagtgtgaaagtggattcgcaacaaagaaaaccaaccaagaatatccgatcggctcctacattcgggagtcgccgcaacattgtaagtaatccccccgttagtaactacaattcatatcgccagccgtaccccatgtatcaatatccagtactgcgtccaaaccgccggtcgttgctttctggggcgtagtacccgggttcatgcgatcaagcttgctctgctgccgatagaacgcagcaggatggctctgggtggtgttattacagactaaaactcatcttcataaaggatctgcttgaacaatgatctgtcaaatatcgtccagggcgtggtgagtttgacaaatatatacttaatgctgaaaggatgccgacgctggtggacagaatccgacgaggcccctggcaggagctgcttacgcgataggttagaaaacgacatcaatagacagagacgcgcggccagcttagtgacctgcagtttcagtgacatccaaagcatatacgactttctggatagttgctgggctttgatagagaaatgtgtgcttgggatccaaatacaccaagcacctgttccaaggagacatttctgactccgacttgatgtagctccgtatatttccgcttggttcatttccactcgttcgtatgtgtcgaacgcctgagcaacacggggtacgaggtgggacagtatcggacggtctttttggctctttagttggctcggctgtgcctcggtataaacggccttatcttctcggttcgtagctggtaccgaaattagcctgtaggatagaaacgaagggagttttgcctcaccttctccttgcacgcggatttggactaacaacatggccaacggcgaaggtaggaatcccctgtcattatgcaagacgagacatcggcatttctcggcgcctgccagataatcaggcttgaaaagatgccatccgagaacgtggggccacccattggacgccactaatccaattcaggagggctattctttcaccgtgttcgaatgccgaaagacacacggtggtataagccattgggatttcgcgtatgtatcgcgtagacgcatcagcacatggcctgaggtacagagtcgactgagagagaagggcgaaggtaaaggcgatcagaactttacattggctcatcatcgatgccaccaatggtcatgtcggggtgatagagcgtgggatcacatcggtatcggggagcccgagcagacaatgcacttgcgcgcttcgactcgagtaacgggaacatgagggtaccccctatcgtacgatccgagtcagcgaggcttgaaccactaggacgagtggttatgacttaccagttcataaagatcgcagaatgtttgcttgcaacgagacgatcaattagatggtgatcatattatattacctaaaagatcaattataatcgtcttcatcgatgtggtcaccattcatgccatgttgacatgatgttgtacccagaccgtcgcagtctccggctgtcgcttcgaagaagccacgctgggtacaccgggcaacttctgagagccaaaggcgcatgacgaacccacctgtgataataaactgtacagtcgtaatgggataagacctcgggatgcggacggccagaggttcatacactccgccgttcatggtatgaaggcggtgaggtcgaaggcggaagacgcgatagagcacgcgtcgtagtgatcttggtctttatctccgacccgggataaaaggactcctcacaagtatgtttcacgggtggcgatgggctgctcccatttacaatagcatagaaatcagtaatggtgttctgttttggggcacaaaagttttcacaaataattggatatagcttgtagatcggcgagataatccatgactcacatgttcttgtagccaagtctagggacgaagagacggcaaggagctgtgactcttacgctcgtgcattgtcgtcgaatgtcctcggttctattgaaatcgcatcgtcttcaggatcagtgagacaggtcaggctaagattcacacacctggggcgtggatattcgagctctcaggaatgcacacaggggctgtacagtagatcagctgaatctagtgttgtggcggagacctcgtcgcgtagacactttgaccagctaacccaaaactcgtatctttgatcgcctggcgtgaataggagtgcatctggtggagatcatatctctcacaggtactgtctgacttgctggtccatgatgtattctataaaagtcagtacagcggattttagtactcgatcaaaggggataacctatcgaatgcctcggacacaagcctgctcgactttgcgtagtcaagtgaataaattgtagagcaaattgcagggcgcaggggacgtatttatagggttctcggctccttctgttgcgcaagtgcttgcttgggagcaagcattgaaggacacctatcctaattgaggcctgttgaaacccatgtcttctttttaccgcgactatttgcggcgacatctttgatgcctttagatgttcagtgagagagacgagtaagagtggtgttgagaaaaagggacggtgagttggtcaagaaacgttggctgactgttgaatccttcacggccctcttaaatttggactttgtgggagatattcaatccgcaatgacaggcccatatttcttgttctgatcacctcatctgtgcgactcaacgaaaagcgcctaaaatttcatcactagaaaccatggacttgttcttcctagcctcgcttcagtgttgtgttggttgtgttgagttgtgggtctctcccgtctatactgcggaagcgaggtcacggtcggtcacggtcggatgtgcgggtgctcgacccgtcaacccgttgaagcttggctatacgttgtcaacactcaattttcgaacttgtgaccatgaagatatattaagacttttttttttctcgttttcttttttgaacctcttttttttggtgactgtaagttctacaatgttctgttcatcgagtttctgacactttcaacgaaagtgggagaggtgtctgattgaaatatatatctcaatgagggttcatatctggccctcaacatcgtgaggcttgatcagtttccccgacgattcgttgacactatcccttctatcaaattgactgccaaccgcccgctagaaataaaaaacaaattccatccaaaagctgagtgcgttgattgactatgtggtgaccgtaaaactcagtctatagccgtctgcgtctgcatattctataagagataccaaggctagttggaaacagtactatccagatccttgactttctcctgtggacaaaatggactccccaaacagctcgccagaccaggaaaagcaaggagaacagcagcccaatgaattgccaatccttaatgataaggaccataatctggagccttcagatcatgtccctccattggtaagtgaaacccttcggcttcgaattctttggctgaccatcgtagacctccccttcgcaacacgaagaagaaataagacataccttagcaaccgagccgtttcaacccacctggaaggtgctagcagacctcgaacgcgacgatcccaagtttgcatttccagcagctcgacttattggactgtatcgacgtctataggagtcgtgtatatccaagcacatcgatgtccaaaagattgaccagagcaatgagatcttaaaggaggctggtgcgtacctaaggaaagagagagacggtcttcagcttcaccacgagaagcagctagctcaactgcgctttttcggacaggcactggaatcatctcgggaacgacttattagcctactcgataactggaactatccctatagtcccaatttggcagggttatcagacgttgcaagagaagcgtaagaaattgcctattccgggctgccctgtcctatagtggcgatatagaaatactataagcggcagacgcggtacaaggggaatcacaccgtatccaaagcaggttatatattcccgaggctttttataagaagggcatcaaatagtcattattcattatcgtggtcttgactgaaatgagtatacaaacaaccccgcttgatttagaccaatctcaatcgtaatgactcgatatattatatacaaaaaagtgtgagtccagggatagcgtcgggggaaacctagtcaacagagaatgtatcgagagactcgaatatagtagagattccgtacaaggccaaagggatagtcggaagccagtgtcggttacacagatatcatgccaggtaattgtatctagtagctatctgcgtatccgatagagattccccatagccgtttcaacccgtagcaggaagaacagaccctttcctatagtcctatcagatactcggtcaaatcgcataaatcgaaattctatccagtgcacctctttagggaaaaggagcgctaatatatggaggaaaatgtcgctagcccgagtagagttggccagatgatctggacctgtccacttaaacccggacagactgtcgagattaggatagaagaggcattcgatcaaggaaggctcttaagtttcgtattctccagggtcgtctttgccaaaagaatcctgccacagatcattaggattagtagcgagacagggaggcggtgtcggtataccagaagattcataccagatagcgtaaaggtcgagatctaaatcgtagtctgtaatattagcgcaaactcctatcaaagaaacgggtatagaccattctcgttcaatccgttcatttctggtatatgactggccgtcgaacgctgtagggaaatatagaggtatataaagcagcgatttaacgtgggttaggagggatagaaagctggagactgagcagtttttattcctctcttattacacagaatcaggacaaactagggggatttatagctagatactaagttatcgaatgcgttaaacgtatcaatagcgtgcacgttggtacctgtcactaacccaaggaaaattcaccagcagtataagccttaactctccttagagaaaacagaaatagatagcgggaaatcaaatgtcattatttctgcccataaacgctctaccacatagagactttactaaccctcaggctcctcggcggaggaggcttaaagatcgctcgcttccaaggctgaaacgacactattacaaagagcctgaaccgctcgcttacactcccacaatactgaagcttacatattacagagctgtagaagagtatcgctatcgcttactagcaagtcatttgacgcttaaagccgtcgctactcctcctcgagtcgtattttctcggccgatttgacgacgtagcattaccatagacaaaagtacaagtcaagcaatttgaggactggtatagcaagggagtcattgaggtttactactttcatgaattccgccgtaagggtaccgcgtattctcgctgggatctattcagtattagtggggttttcattccctacggtgggggatataaccgaccttaggttcgatggttgtgccgtttgtgacttgctgtggttagttttctaacttgggttcattttctggagcttaggatactcggcactgtctcttggccggccgatcaataggggaaggcgaagtgggatggtccattttggtcatcaagatgaattggatctgaaattacgcttaaggcgcatttatagctgacaattcacacgaggctgctgttacttctactagtgcttccttacctaggatcgaccgcactttggaaaggccagtgaatagttagctcaactgttgatactcgatcttaccggctgctcacgaatcatccaacgatatacgaaaagggagaaaagagttaacgttaaaaaatcgttacccgacctactgaaggtagtttataagtgttcttgtgacgcgttgaatgttagacatcaagtagacctcggtgaaacttaaccgtaacattaatttaactgcaaatcatttagaacgaaggaaacagatataccgcgtttaagcttaatatcgataccaattgacgttagtaaccgcggatctcgcattgtggtatagacctaccaaaagtagatttcactagctcttctaggctaccaatccttagtgactgcaccaaaaggttcgatgagtgttatcatattattttgttttggataggcctccgggcattattggtatttcccagatccaaacgatctcctcaaactactgtcctcccacgtaccacgagcacgttaactgtgagatatgaggaaaacttgtttttcgagatttcagaggcttaagcgaaagctttataaattcaaatatacttttctcagtatcagccgatcaaaatctctcccagagatacctgccgccgcttccgaattggaatacacacgacgatcagccgccccatccccagaggcgtccccaaatgacgttaacagatcatgaaaatgagacaaaggcaccccgatcagttttaatctactaccgcgaacattcacaaagcagactgaaactaaactcttttagttccacaacctatcgggtcgtcgtgcgagaataaagagcctttaggtagccattctgtacaaaactcgtttgtaagggaagttgagagaccgcactgcgtaggcgagtaacaaactttcgttattcgtgaattgcatagtttataccggatgtatgtaacaactgtataattgaaaccgcttattatctggagaatgtctggatcctcgatattcacggctcgggccaacctaaatgcacctacctaagggtatatcgtagtttggcttcttcaccaggtagcctccggttttgaaaaaagcccattggggtaaacggctgtggcaacattgtgggatatgctggttggccattaatgtaccagtggagccgaatcataaggctctgagtgaactgtgatatctttagcttgatctaatagatacaaaaatcgggtggcccacacttttgcccgatagcgataacgtctgcactcaaagaaaagtaactgctttgtagctaaggaaatctcctgctgcgctagtagatacactaacagagggccctgaagcagctgaaagcataatactccatttgtccgggagtcaagcggcacagtgttttaacaatgattcccgtcatctcccgcccatatgcaccgctcacggtgcaagggatcacctaatacttggcccaatacccattatagatgagcaggattgaaggccataatgaaaaagtaaatttataagcgtctcgttccaattacgaggtttgtatgtaagcagctggtagtccccagcacccctcatcttgttcctgaaaagcggttattatttcctgggagctctagccacatttgtcgggatacgcgcgaggcatatataatgagtggagatacgatatacgggacttacatggcatctaggttcactgggatatatatgcgactttccccttataactgggcctcaagatccaagaaaccggcaaataattcatatagcagtgtagcaatagagcctaggggacccattttaagggggaacataccacatatcgtatccagagccttcggtcttaaagctcataacccaacacgctcttcaaaatacccttaggcgactcgcagtttgccagctataccattccgcgaatgcacggtctaaatgcacggcccactgaatccaaagagtgaactagaatgagatatccttcttacaacctactgatcagcggtatagcggtagatactgcatcgcaatatattcttcgacgttttgactgtttcaagcgagaatttccatgtcagcagccctgacacaatgtaagtatagttcccataatgaaggcatataaagctagcgaggaaaccctacagagattgcgcaacatcaatacctattcgaatctttttctgcctttatcatcagcacaatatcctctgtcctaccttagaacccatttgctgtctgcgggatcccttatagtggtcctgtgtcctattgcggggtgacgaagaaaggcaagccgtgcaaaaactctgtcaaggttcaagacactaagatcggctatcaaaagttaaccactctctccagagagccatttgacctatcaactttgcagtcaaagctctgcaatattgctagagtctttctctgcgcgagatagcaccgtcaacggcaggccgactaagttagctagcggtagtataaagcagccatccgcaaccaggcgcgagtgccgcatagctctagagttgccgctccatctattacacatctaggccagcgtcagatattatcagtctccaggagtcgccctgcattaggcaacaccgacaggtcaccttacaggctcagataagacccaccagtgcggctgtcaactaaccccgagccagtgcagccattcaatccatttatcacttctgcaatactacagacgaacagtgttccatggcatatttcgccggcttaaccagctatcctgacatcggtcgctaacatctgggctggtatccaaagcttaacgctcaaggatctcaccctgagcgacaaggtcgacgacatctactgtgtattttgtcttaccgaggataaagatcttacaaatgaatgtgtgatcttacgctgtcagtgtaaggcgctttcccacctagcctgcgcggaagagtggctggaaaaacgaagtacagtttttgggacgtcatgctatatatggtaagtagggctgattctgattatccaatgcccgaggtgctgatcaatacagtcgaaacgaagggcctttagacgcttcgattcgcccactacgagtccaatcgtcggatactgagacacatcatatgcgcacggcaagtgaatcatctcccgagagagaacctgccactatcacgaattcatcactaaatgacccgagtcagagccagtcgcgtcagcggtcagtgggaccccaagggagatcagttgagcagagcgtggaggatggcccccgtcgctcggctaggctaggagctcatctaccacaaggcccttctacatctgcaccaccccgccggtcagcacgactaaattccactcgaaggtgatctttgtcacagcggaggtgtgacacagtcggcattgggattagtatcagagagcatagccatgatttagaccttggagtaagcttagaaataatacaaatgaagtcctgaacgttcaaaatcgcagagcaccaaaaccacgcgaccttttcatctttgcaagtactagatgccaatacacccccaaaaccggttggcagtttcgcttaatttcggatattttaagatcgaaaccatattcatacctaacggtggtggccaaagaattgtagacatggatttatctcagtggagcgtgtcgcgtcaagacggagattgttgacagaagaaacacatctcgggccggcaagagactctggcaaactcctatgctggttaggttgactctcggaatcaatatgttgaatctgggaaactcaaaagcatttctaggatgtcaaggatatacattaagcatgcggaacggatggagatatgatccgcaggggacccacatggtgtacatgggttcacctgaacgcgaggaagctacctttcttttgcttcctcgcgctgcgtcttgtatctggagtcaactatagttgtttttgatattgattattcatcttgaaacactatccacctctatgtatacgtgagaccccgccaaccccgccaaccccgacaacaaagacaacaaagacaccatgacctccaagtccaacaatgggaatcctaacgctcgaggagcagaggaagtagaacggagaggacggacaaaatcaacgcactgagcaatcgcgcacacttcgtgccatctttgcccatagcttgcttttcatatgacttggacgaatgatgtggtttgtcttcatatcctggttcaaaagtgtaaccctgcaaccgttttttatgtccctgcccttgcaggctggaccataccatctaccaagcgcatgtggatgcggtctgtagtcaggatcccatttcgcgatatcggatgaccgaagttcctttatcgccggatatctgtagtaacagtattccgagtagactccttgttttgtgttggtgaaaaccttttccaaaggtagctttaccgattcatgacattcaataacatcgtaaatattcaaggtaatgccagacgggaattgcacctcatatctattcttgtcatatttccagccatcctgaagagcggcaaagaacttttcactttcgtatctgagatcgcctgaataatcacctgcgataagagcaaggtagagacgggttgacgattttctgggccgataggcgctcaagttatggccaataagaactggagaacatccatcaaatgtcagagcaaactccagccaactagtatttttgaagatctgtttccagaggatagaactggtgtttatgatgttttcgacatctgctggcgtcagaaagtccttgatacttaaccaaatatcaagtggggtttcaaagagcttcattgtgaatgactcgccctggtgccggtgttgatccagatcgtaccagggaaagtatttataacccacagcgctatttcagaaatgccttaatcttacaaaataacaagcaagagtcctacatttttgtcaggccctccgaaatgcacctatacctgtggttatagagctggtcaataacagaatctatcctccggatttctctgaaagttgcggtggcctaattccttacccatccgaacctcccttatttgcaccctagctcaaatagatattttccataggcgagaaaacatgctgttgatgttcagtggttgtcatgttcaacgttccgaacgttaacatcgattttctgacaccattcaccacccgtacatcgccaaaggttgttatctgagaatgttcagcgaatgtatcagcatgatactaccaggctgttgtgccccagtgctacaggaagcacaaacaagactccgccggtcgcttttttctttattagctgaatcacgacgggatagcaacccacgagatatcggaaatgctacgcccttccacatgtccctattcactaccaattccaatctagcagccatgtggctcccgggaatacactgtaaatcaattggtggttcgggcaacacgtggtcatggcaactggattgagacatcgttgattggatcgtcttggtctacgtaccgtgattgaggcaacaaattaacatccgcagtcctcctgggagccggcaccgatgttgctaacccgcgaaaacttgacagcagatatctttttcatggtggacatcaagcattcaaatgctcatgattgtcccattgtggaagctattacacccttattttcctcttgccagtgcagcaccatcaccagcaagaaggaatcatcatggaccacaagctgtcacaggtatcaaagggtccgataccccagacatagaagaaaacaatggactcacatggcaaactggtatcgttatcttagatccccttctcgaggaattcatcggctgacaatctatctcgtggaggcaatgaaccgactgaaagcttccgtcgggttgttggccagtttatcctcggaaatagcggccacacaagccaggttttacagccatctgttgaccagcccagtggctctgtagctacagagttagctacttctgttgttagctcgagggactatatgatcactccaagcgccatgaaggctgaaagccacgacttgccccctctgaacgtgaaaaagagaccagcggaatccccaaccttttcacgaaagcgacgtcgacattcatactccagctctcaaatactgggccgctcgcagacttgtgcatcgaaagagactcccaagccttacaaaaattagcaggcaaatgataaatgatacaattcaatacctgcaaatgctatctgaccacatcttgatctccgacaccattttgtttagggagtgggccactatgcatctcgccacccaattgctacaaagctggtacaaagatatcattgcgaggtaggagatggaattagacgccgtatccaagtgtactttgtcaccgatacagccagaagagaagtgcacgaagtgtgctgccgcggatgcggacgagctgtatgattaagaggttactcctttactacctcgttggctatcttttgatagaatagctggcccttttggaaatggacgagaaaatatagtgttttgcaactaagggacagtatttaagatcttgttaagctcctagtctatcagtccgcggacaaagaacattcaggtgcggagaccactcgacaagcaaaaataaatatatatgagccagctgcatcttgatctccaaataatgcaatagcgactaaagatgcctagagtacatgtatgtaccagaaaaatcggaattggaaggatgaagcaatagcattcttcaaaatgctattgccttgaatatcaattccagccactctttggttattcagcccgcttcactcgtagagatgcaactttttgtgctttagcatctacaataactggaccatttttgccgttctgttaatcggctcatgactgctggtccttacaattcggctgtttggcggtcattctgtgtctaaatgtctgcatactcattcagatgaaccaatatagaacagcttggccctatcattggtaagacaagaaaatcagagcgccggggcccaatcagctgtgccagtattcgtccgagaattgtgagagagcgactcgctgtgctgaaaagccagcttccaagccaaaggcatacctaaccataaccaagtccaccgaattctctctcttcacctggaaaacatggtcgttgcagcgttaactagatgctggtcgcatagaagttgcgagtggtcattacatggccatgtaagtggagctctgtgcaacgcaataattacaggcaagtttgccacttcatgagcctaccaattattgtaataaccacaccatgcctgatccggtgcgctcgtcgactcatgagcgaaacataaggccgccgttacaaagaagctgccgcagactctgactcgtttgatagcttccgtctttatttttggcgcgttgtcggtcctagggaaactagaatttgtccgtggacagtattccctagcgccgtgtagggtaacaagatcctgaaaaagttgagttttgagcagtgcggtcatctgtcaattcgcatcgagtttctaattagctcgagactcaggttcattatggctgacagtttattgtcagttataaaaggatacacgcgccgttaatggtttgtatgtaagctctgtggctgatcggcctcatcttacgactgtcagtcgatgctggcatctcctatcacgaccgagagtcgaatccctaacatcgcacgtacaaaacaaccgaattgcactttctctcttagttcttacgttttgaatccgagagaacaccgccctgtcatcatgtcatccaacctacccaaagacaacatgatatgtgaccttggcactatcaaagctcaatatcagctccccatttcgatgtcggcccccaccacccgcgagagttatacggcggccaccacgaatttaacaggacctcaccgccgcggtagattgaaggttgtcacggggcctcccaaaagcctttgcctaccccacttgtgtggcctggagaatatcgcatccgtcctgattgtaagacaggagtcaccgtgggatacctatcggaaagtcattacgtatgagaatgctggcaaagttacaattgctacacgccgcactcgcccgtctcgcatggtagccatccggacatacgggaaagacaatgctcgaagattgatatacagattcggacgtctagaacacaggaacgttctctccttacatgaatgctacatgcacgaagatctcgcgtccttcctagttgatgacttgccgctgacgctggctcatgttgtcgcttttccgtctttacatgaatgctacatgcacgaagatctcgcgttcttcttagttgacgacttgccgctgacgctggcgcatgttgccgcttttccatctgtttatcctagcgagacagaattgggatccattatctgccaggttggtccctcatgcccttcgatgagctgttctgacattttagatcctggatggtgcctgctacttatcttcatttggccttgcgcatcaatcactggcctgtggtgatgtattatttggcattgacgggatcatcaagataggtttgttaaccgccgcattcttgcattatctgactaaaatttcgcagcaagtttggacctttatatagattgcacgccaaagcaatctgaaattgcatatattgcggctcttccgtcgataatgatgcggctcatgcagaaaaatggcaaagatcaaggccttgttggcgtgaatgatctggagcgatggccaatcgattctgccgctgtggagattttgtccgctaccgagacggcagaatcaatcaggtcgctgagaaatgtgagttctcctagcaaggtatcgtgtttcgctaatgtccagtagcaacccctgttggcggagaagcaccgcccaaacgatgatctggtggtcctcgcaagagcagctctgctctccactagcttgaattgtatttacgaccccggctctaaaaagtgctaaaggacaagatctggtacgcaactcagatatccgcgaatcctcgtcatggtcataggcttcaccaataagcaacatttcatgcgtctcctacagttatcttgccacttcttagggtactttgtttcttccacgacataatccattgtttttgcacaaatccttctcatgttgcgttctagtgaacttagtactacataattaacgttacattgctggtgaaagatcaaggctaacattgaataccgtagggacttctggtgacatgcgcaacctttgaagagccgagtgtaaagaatttcatgcgggcaatctccattcgataatgaagcctcatgcattcttttggaggagctcacaattttcctactaaaaataaacttagctcttcgaagcccaattcttgagatcgcaacggcactgaattgttagacgtccataaattttaaggcagccagaacgcaagaagtagggcggggaaacagccaaactaatgtgaaggtttcagaagtacgtatgtatgtcgcttgcagacttcaaccaatggtgaatactgggaagctgaaacaactggtgagcaacggcattcaggggctatgtctccagcttttattacccccagcggccggttagtgatcgtctttaacactctaaagttgagttggaaagagccagcaccggttggttcatttcaccgctagtgaactagaagggttggttggcgtacgagctatccacgccaaccctattgtttctcgcctccttccaaatttccctcgggaccataacttatttataaagacctcccctcagcttccactggtcttcatgtttgcacagaacacagtactttgaggttattatttgcaacacccaccacaaattccatgcattacattactgccctttccttgatagcctccctcctgggaatggtagctgccactggaaactcagtccgtcgatatgtgcaactccgtgcttggggtcagcccggctgtcgtgctagtaaccttggcgaggaaggtatctacagcgattacattggtttatatatgccatttagtaattacaatataatccgctccgtgagcgttgagtctgtcgaatcaggatacactcgtaagtcccggtaatttttagactgtatattaccactaataaatttttagtgtacatttacaggaatctgcagtatcattctgaacggattaaggttccttttataaaatgcgttagtggcgaacacgagtataaaatgtacatattggtatacgatgactgagatgtacttcccaggaagtggtagctaatcgaatgcataactaggagatatggaaggctgtattaaactgtattgtacttacctactctgtctcatttgcaccccaacttatgtaagagggggtttttgagacctatactacaaccgagaaaattacaggaagataaaccagtcagaaattccagcaaattaacttctcaagatgtcaaaatggcctcctcgaacttgatttaagtaaattaacctttggtttcttgatacaccaaacgcacttgaccgtcccaggttgaccacccataagtgtcggttgtggaggattgaaagaggccagctatcatatatataagctgacaattcgttgaattattttcctttgaaggctccttagcgttagtcaatgttatcggcaatggaagtcgtttaaaatgttgccgtatccctggctttatgctctaaaattcctcatgaagcgttcttttcagcagacgcaatatttctttttattataagctgcccccctcatttactgtatctttttgctatccgagaatggatacacgaaccagtgccttaataagaggtcgaaaactaatgtcaatgacaactttaaaggcgttattcttctgatctatatctctacagtactagtcatgaatataaataattagaacttttccagcctccatcaattgccacagctattactcgcactgaaatggccccaagcgctctacggtccagcggccaagtgccaaaagccattctgagctaataccactactcggtaatggttctgaaccgccacagaaaaagagcactcgctataatacacacgcttacgcaaaatcactacctccagcacctccgggatgaacccggactcctcgaacgcggatacaaaataaataccacggagcacaggtgtcattgctagtaaagccaacagaccaccgcggcgggatcaattgtcataactggattctacagatgcaaaaggccccggccgctcaaattagtatttcgaagatacctcacttttagatcgggatgggctcaatgtaggctcaagataggctcagggtaagctcagggtgggctcggggtaagctcaaggtaagctcagggtaagctcagggtaagctcagggtaagctcagggtaagctcagggtgnnnggtaagctcagggtaagctcagggtaagctcagggtaagctcagggtaagctcagggtgggctcggggtgggctcaggtgtggccagattggtctcaactccggtgaggggaaattctgtaagttccccgcactgtattgtcacacttggttatccattacccgccactcatcgctgtttgttttgtatggtaactttacatcataccggaacaatatactgtaatacaccgtaatcgtgccacgtcgcccatcatggaccattttaacagaccctcaaatcaattgtctttatcatcaattggtcttcctcgatactgcatcctgcatcttagtagtgtccagtatccaggcggatatcattaatttgtctgtaaagtgcggggtgtatatcaccgttcgaacacacttgaagcccggtgcccgttttacttgtcgtttcaatctagtccttagctgtggtactatactacagtttcatgattcggactcgtagttggcagctgcctgtatgtttaagagcacgacatgacaaaggaggcacatatgacgataccccgttccttccaccaacatgacgtcttttacccgaaattggccaggtttatagaggcgaaaatcaaacattcttgttatacggcaaagaccagctctgccaaaatttaaacgaggctacatgtcccaaccaagataaaaagtatcgcacccataaccctgaactacgaaattctccgataacatcttcaggaagtgaggaaacggaaacttcttcctattcatgccagaccaagggctgttttagaagagcgggagacagtcccatacaccctttccgtatgattcagtagcgcggactttgactccaacttctccccgcaaatagagcactcatagtacatatcatttgaaaacggcttgatatgcctgttgacgaagtgtcggctcagagatccagggttcttgtacatccgcaagcgctctctttatggcagactagggctactaaggtaaatgaagcagatcgttggtctctctgttggagatttaacgtaaaccgaagcgatagccttcgaaaacatatcgtcgctcttatctgaagcggttggattctaccttttagacaggggggcggctggtagcatatcgatatcatcggcggagcgtttttaggtgatacgacgccgcgagggtataccctcttctgcatcgcatactgtaatcactatattaatcgcagcaattcgacgcttatattctttctcgatcgtcgtacccggcatcgttaggacagtgttaataagtgtcatatgctgcggtatcatatagccggttcgttccagtgcaaccaatacttcttcgtcaacaacctttccggaaagttgccgttcgctatcgatcactggctgctcgttcttataacgctccaggttctcacgaatcaagaggttccgttgccgccctttcttattctgcagttgcttaactgagcgatcatactgctcgtctacattattaaacttttaccatagctttttcactctcttctcttaagctttccgtcgcttacggatcgttcagggttaagggaagttcctccgcaaaagattattactaaactcccgctgtaatgcagcctaggcattttcatatatacgctttttagcatctcggtcttatttccgcacctgcttcctctcttctagagtgcggacacgtggaatgttattgatatagcttgaatcctctagtcgatagggtctgcagggatcaatggaccgactcatcgagcaggcaaactgtataagctgcttctaagcgggcaggccccatacaattgcctaggcatctacatgaatacccacgctgtagtgtcgaataaacgtatcgatactagcatactgcagcataacgttctgtagttcattggatacatccgctgattaagaggaaagtattagtctagggatcccatcatatacgttatttcactcacgactgtcgttgaacgcttttgctgcaccgtatcggaggcaatatggcttcgcgacttctgcgaagcccgtaatttcaccacctcgtttcattcagtaactcagccatcccctagtaagtctttcttctagtgcgatttaaatcccactaggctcgcgtagtacttggtaaaacacgttttgactgagaattttgtctttcaattttaattcctgctcaccaagtctatagaggacccgaagacggtacagtttctcagggcagtccatcacagggccgtccttggacagacttttaaatgcgccaatcctaaagagtatacctagcagaaagacataaggactgagaaccagggtgggatcaaagatgatttccggaattgggaacgtattcctatttcaaaatggtaagcaagctttgactgggtccattggcggaagaacttcggcatacagagttgcgcagagaaaatagccattaagtgaaaggggaaggaaaggaggaaaaaagaaaggggacgtcttacgactctttctcgccaagaaatgtttttgtgaattccggcctcaaataaatgaaaagttggggccgtccaccatttggatctcgaactaaggttagcttaaggtcctggaagcgaagtttcaatagtgctcccggacggctaccggtgatagcggctagctagcagaaaagaaggagttgtatccggtaccagctataaggaaaggtcatttctgttgtggataggatcactcgcgcaaactcggccacatcttcgacatatatcgtcgctttcggtcgaccttttagagaaagacctttttctgtcgcaactatcgcaagcacctatagaaagtcagccgcgtcaactgatattgatatcgatactcaatcggaatctcacgtcacggatcttaacatagacatctttactgagctcatatccaacctcggccttgtagatcagatgccaccacttccaaaatgcatcgagcgtgcttttggttttcactcccgcggtgcgacgacgtctatcctttccccgtcgctggtcacaccgccataagaagagagccttgaggaagcggaccgtctcctcgttatcagaaagccaatacaaacattccgcaggatcgcgcttagtgcccttgcagaacctagaacaatcagcgaaccaagtaaggtagggggatcttaaagtgaagtctcacttatcccagaaatactgcgcctcatccaatctctcttaggttttcgggctgtagcgtttatgtcgaagctgggaaacatcaagagactcggcctcgtggaggtaatattcgggtggaagttgctcctcttcatcttccgatgctaggtcatcttcggactcaacttcagactcagactcggattcgctgcttaagtcgaagacactgggtgcggtggaggaatcagtatcggaagcgtggtccgaaaaattctcagaatggcatgggctaatatcgctctcatcgccggacggaatagaaccacgagatgccatggcaggaggcgatgggtgcgatcgagaaggtacaagaaggcaagtcagagaatagggaattggtagtaaccggttctcttttcatactgtggccgtgccgttgaggagaccgacctgagagtggaagggttgcttggtagcaagaaagaatattgtgtcggggccatggccgttgatatttataaaatctgaaggaaggagggaaccaaggaggggagccatcttcggttcctctgcttcaggagatggatgagggtggggcggcggcgacagttgctatagcagaaggggccttgttcgggccaggtaccaggcacagccaacacaaagcatgggtggcagtagagagagtcggccgtgtgcattgaggcacgtgatgccaagcccagagacggtgagtggagggcttaaaacggcctccgaggcggccatttctggcctcccattcaccgtctcatacttatgtgtagtattgtttagcgcattttcggccttatcagagccttatactattaatatgattttatcgaatattatatcggcgaattctgggaggtacgagagattctggattcgttcttagagtgtatcgttaatctaaacgtacagctagctagccactatatataactagtattcctatctatcaaatttcgggttacctacagtggggcgaggcatactgctgttaataatatattctagtctcaatggcgtgagagcgaatttcacagggatcgcctatctataaggatttctggaattgtacttgagtgctttgactttctgtattttcgcagctgagatgttaggtaggttagtggcctgattcttcttattgtatccgttacccgatgatattgtgttggcctggggttgagaggtgtttcctatctcctaagacgcgttgttgttgcctgatggtaaaaattgtgactgattattcgggttgtcatccccagagtcgacactgctatcagctatgctgggagctggtttgccaattctgttgttaattgaggcttgcgaggatcaaatccgattggcgagaaacgcgcgttgtgcgggttaagcgccgggaagtgggatccaggaaagagactcagggttggaggttgctagcggtccttgctagctagagacaagtgctcataacctaatggcgtatctgactacgttgtacctgaaaagggaaaacaactagtgtagattcgctaagatctaaatggacgagggagagggagagaggaagagggagtggaactatctgatgatctgaacccacatgggtgaccgccttccggtcacccaacacatgagcctcattttgtatggttgctggaatttaactacagcccaagttatcaaataggtttatgcgaaatggtcataatgatatctctaaaatacggattgttgtgacgcccccaaacagagacacgacgatgcaataaccactatgtgacatgaaacatttcgaaagttgtttggaaacgcgcagattcttcgctgtgattgacatgtgatcatctgcctcaactgaacgtcccattagcaggcccaaaatacccgacagctggcatcgacttgtatggtacaccctgggcgtcggcagtattcaagtacctgtctgcgtcagttgcgcagcgtgccgaggcgcttcataagtgtcctgcgttgatgtttgttgcgtagctatctgttgttcactgcgttctggagtctgttgagttggtgaagagaaaggatactggtactctgtccttgtctgttctggggacggagtgtcttcccttggagttgactctcgtggggagctggtttccctgatcaagtcctgttcaatcgagtctgcgtactggtgtacttccagcatgtccatctcttctgcgttgattctagctgtgagttcctcaagtcttctctggaagttggctttcctctctgctagcttttctgtcattgtaatttgctccgtctgaggggttgcattctcactgtgaacagtctgtgtctcctcttggattggagtaagagtctggttgactctttgcgctgttaactgttctgtgtttttgggaattggtgtccctctctgaagtctcccaaggatcgatcttgtgtgccttggtgcagggagtagcctctgtcgacgaggcattaccggggtctctggtatggttgaaacgctgccttgaattgtgggcaagtgaattgttgacggggttactggatcctgtctgtagactgttacaatctctgtccttggttcggttctggctgcgtcgatcagcgggatggaaatttcgtttgtgtcgtcatctcctgggggtttcgatggctttggcgctaccggtactcctccctcctgatcttcgtcccctggttgaggaaagctgacgtccctcgagattgtaatcttcctagtttccggattccagatttttagaatatgtccgttatccccctcataacccatgaggtgtcctttccaagatcttggagcggctttgcgtgcctgtactctcttctccttcggaatatgaacgtagacggttgttccccatggtctgaggtgcttcagtgacggatctgggttgtcgattccgagttctgtgcgccagtgtttgagtggcgatgtttgagactttgggttggttaatctgttgatggtgtagattgcagtttctactgcgtagggccacagctcctcaggtagcttagtatcgatgatcatcgttctctgaatgtcgttgacgtatccgccgaagcgttctaccgcgccgttgggctctgccgtgtagggtggtgtaacttcgaaagtcattcccttttttgtgccccaagtgatgaagttcttaaattctgttccaccatcgagtctccatattccggggtagcgcccagttcggagtttgattttttcgcaaaatgcttgaagcttgacaaatgcttcacctttgttcgtgagagtcggcccctcgagatatcttgttgcgtcgtcgaggataggcatccagtacttttcaccgttcgggccctcaggtttcataggctgcgtgtctacatgaaatttccatgccacgtcctgaacccgaaattgcggctcacgagaaatctgtttcttggatttaccttgaaaacatgcttcacagtcgaagtattctgttccatactgttcttcgtcgtcaagctcttgtgcttgtttcagcgttgaagtaagtttggcttttccagcgtgtccaaagcgtcgatgcgcctcaaaggcagaaattttattgactaatcctgtttcttcgtcactgtccgacccgtaggatgaatcttcttcgtgtgaatcgtcttctttaggaccgatgaggtacggaaccccgagtgatgtgtttgcaactccaacggtttttccagtgccgtctgtaagtcgcttagttcttgtgtcatacgagatatcctgttcttccaggagtttctgcatgccgaacaatttgccgtgaccccttgggctgtagtagccttttgtcaggaaggtgtatgttgttccgtcttcgagacctgctttgacaaggacctctccgtgtccttcagttaccactctgttgccggagtagtcccggtaggcgtatgccgattccgggctgtcctcctggtatgtgtagaaatcttcgaagtcgtgggtgagtgttttgtctgatccggtgtcaatcagccagctgttgaaactatctgtgtgacgagctgttgccgttatggccatattgcttcgcccctcgcttcgcagtgcgatcgagtaattccatacgtgtgggctgtgtgtccagtgtgcgggtggatcttctgacagataggaacacttttgagctttgtgtggcccgaaaccgcagtaggcacacatcccgctctcatccctttgtgttccttccttcttttccttgacatactcatggatatctttaccaggaggtggttggttgcgaagggtcttcttcttcttgggttcgttggatgtacttgagtcatccttcgaagatttgttgtcttggcttgaggaggcttcgctgttacctcctttgccgcccctcttaccacctcgtcctccgcgtcctccgccgcggttgttaccccgtcccctcgaggactgggctgcgttagcagtcccttctctgtcggaaactgcctggaggctcttgcaatattggtccatcttttcgagtgtgattttcttaggttcgatattactaatctcctcgatgatgaattgaaccttggatatttctttatccaattgccgtagaacttgtgatagtgcgtgaaaagggtgtggttgaattttgaatcgcgaaagaacgtggtattgtttctggtattccgcaatgaattccttcgcagtgttgaagtccgctcgtttcatttcgtcgaacttttttgtttcgtttagcgcattttcggccttgtcagagccttgcaccattaacatgatttcatcgaacattgtgtcggcgaattccgggaggtacgagagattctggattcgttcttggagtgtatcgtcaacctgaacgtacagccagctagccactgtgcgtgaccagtactcccatctgtcaaatttcgggtcacccacagtggggcgaggcatgctgctgtcaatgacatattccagtctcaatggcgcgagagcgaatttcacagggatcgcccatccacgaggatttctggaattgtactcgagtgctttgactttctgcattttcgcagccgagatgtcaggtaagttagtggcctgattcttctcgttgtatccgttacccgatgacattgtgttggcctggggttgagaggtgtttcctatctcccgagacgcgttgttattgcctgatggcaaaaattgtgactgattattcgggttgtcatccccagagtcgacaccgctatcagccatgctgagagctggtttgccaattctgttgttgattgaggcttgcgaggattaaatccgattggcgagaaacgcgcgttgtgcgggttaagcgccgggaagtggggtccaggaaagagacttagggttggaggttgctagcggtccttgctagctagagacaagtgctcataacctaatggcgtatctgactacgttgtgcctgaaaaggggaaaacaactattgtcgattcgctaagataaaagtggacaagggagagagagagaggaagagggagccgaactatctgatggtgatctgggtccacatgggtgaccgccttccggtcacccaacatcccccctacagatctcatatctcctgttttgaaaatgatgatctagaaatgtcgtaatcgtggtagtcgtaaaaaaaccccaaattttcctttgaattaagtcatcccgataagcttcaagaaagctcggaattgctctttgggaagcgcctttgtaaacctgtccgccgcgttctgctttgtgttaacccttaggatatttatatgtccttgggccatagcgtcctttataaagaaccatcggagtgccagctatctggtagtagacttgcctcccttctttattagtagtaactgtgagttgatgttatcggtgtagataactgtgggattgggtcttagtaggctcagtgagtctgcaaccttagtaagctatatagtatcctgggccggctggttgagcgtataccattctgctattattgtggagttcgctgtgattgtctgctttttagtagactaagctactgggactcctgtaaagaactagatatatccttcggttgatttggagtctgtctagtctgtgtataatatatctgtgaatgctatgaattgtagttcgtccgactttctaaagattagtcctatcttagggttatgtctaaggtatttgacgacgtgtcttattgccttgagattagaaaaagtcggtattgctagtctatattataagcgtataatagcgaatctaatatctggtcttatcttaatagtaagctagttgagtatccctactactgtctggtagtattcgaaattctcgttattaagtagattagagttaatgtcttctgggttagactctctctatcttggtagtagtggtatttctttcgtccctgtagtatctgtaatatatagaatcttttgtatgtaggcttcttaagatatgataatcgtcctattgttgtaatctctgtcgagtatgtagttaagatactgttttggttctcctaggtcttttatattataatgtttcttaagttgctttataactgagtctatttctctggaagtaggtatagtaatgataaagttatcgatatagattattatgattgttagatctgcgcagttctttcttatcttaatgtagatatatgggttgtcctcgaggggtctaaagctggtttatcgaagcttatagtctatttccttattctagaggaaggcagagtcttataggccgaaaagagtctaattaagtatatatacctattactttgaatttccttctgtatctgtaaactcgaagcctattagctgtcttatatatactgtctctgtatcttctcttaatatattaaggtaagccgctgtgaaatctacttaatgctatttaagactatagactgcgataagtattaagataattttgattattatttccgatataactagtatataagacttgcttaagttatcgcttttctcctagaagttgctgtagataacctatcttaccttaaagctgtagactttatctcttgtgtttgtcttaatggtaaaacgctattgtcctggaaggacttttgcctttggtagttttaggattaatgtctatattcctttcgtggtaaggttattaagctgtttttctattacttccttctatttgttctagaaaggtgatttttatacttgtttaaaacttgatagtaggttgatatccttattgtaaagaggttttctattatagataaaaggtgtgtctatatctacctaatcggagttatctagagaaagtttctttgcgtttccttcttaagaagtgatatgtttttctatatgcctggtatctctcttttacttcttatattcgacgtttaggagtttttatttaggattctgatatctctctagtaggatactgatatttcttctttttaatctcttagctgaaggttcttaaatttgagttagtactactattactggttctgcggtaggtataataggagtaatcttctcctatatctatatcggttgtatagtgtactgaggcgctttataagtactctgcggtaatatttattatatagcagtttcttataaactgtattccagagtctgttaagttagtaaagagaaaggatactggtactctatctttatctattctagggatagagtatcttcccttagggttaactcttatatagagctggtttccctgattaagtcctattcaattgagtctatatactagtatacttctagtatatctatctcttctgcgttgattctagctataagttccttaagtcttctctagaaattagctttcctctctactagcttctctgttattattatttactctgtttaaggggttgtattcttactataaatagcctatatctcttcttaaattagagtaagagtttagttaactctttacgctgttaattattctatatttatgggaattggtatccctttctaaagtctcctaaggatcgatcttatataccttagtataggaagtagtctctgtcgataaggtattactagggtctctagtatggttaaaacgctgccttaaattataggtaagtgaattattgatagggttactagatcctatctatagattgttataatctctatctttagtacagttctagctatattaattagtgggatagaaattttatttatattattatctcctagaggtttcgatggctttagcgctattagtactcctccctcctaatctttattccttagttaaggaaagctgatgtcccttaagattataatcttcctagtttctagattctagatttttagaatatatctattatcccccttataacctataagttatcctttctaagatcttagagtggctttatatacctatactctcttctctttcagaatatagatatagatagttgttccctatagtctaaggtactttagtaacggatctaggttatcgattccaagttctgtatactagtatttaagtagcaatatttaagactttagattggttaatctattaatagtatagattatagtttctactatatagggctatagctccttaggtagcttagtgttaataattattattctctagatatcgttaatatatccgctaaagcgttctactgtaccgttaggctctactatatagggtggtataactttaaaagttattcccttttttataccctaagtaataaagttcttaaattctattctactatcgagtctttatactctggggtagtacctagttcggaatttaatttttttataaaatacttaaagtttaacgaatgctttacctttatttgtaagagtcagtcccttaagatatcttattgcgttattaagaataggtatctagtacttttcactatttaggcccttaggttttataggctatatatctatataaaatttctatactatatcctaaacccgaaattgtggcttataagaaatctgtttcttagatttaccttaaaaataagctttatagttaaagtattctattctatactattctttatcgttaagctcttatacttattttagtattaaagtaagtttagcttttctagtatatctaaggtatcgatacgccttaaaggtagaaattttattaactaatcctatttctttgttactatctgacctataggataaatcttttttatataaattgttttctttaggactaataaggtatagaactctgagtaatatatttataactctaacagtttttctagtactatctgtaagtcgcttagttcttatattatataagatatcctattcttctaggagtttctatatactgaataatttactataacctcttaggctatagtagccttttattaggaaggtatatattattctatcttcgagatctactttaataaggacctctctatatcctttagttaccactctattactagagtagtcctagtaggtatataccgattctaggctatccttctagtatatatagagagcggctttgtgtgcctatactctcttctcttttagaatatagatatagatagttattccctatagtctaaggtactttagtaatagatctaggttatcgattctgagttctatatactagtatttgagtggtaatatttgagactttagattggttaatctattaatagtgtagattgcagtttctactatatagggctatagttccttaggtagcttagtgttaatgattatcgttctctagatattgttaatatatctgctaaagcgttctactgcgttgttaggctctactgtatagggtggtataacttcgaaagttattcccttttttataccctaagtgataaagttcttaaattctattctactatcgagtctctatactctagggtagtgcctagtttagagtttaatttttttataaaatgcttaaagcttgacaaatgctttacctttatttgtaagagtcggtcccttaagatatcttattatattgtcgaggataggtatctagtacttttcactgttcaggcccttaggttttataggctgtgtatctatataaaatttctatactatatcctaaacccgaaattacagcttataagaaatctgtttcttagatttaccttgaaaataagtttcatagttaaagtattctattctatactgttctttatcgttaagctcttatacttattttagtgttaaagtaagtttggcttttctagtatatctaaggcgtcgatataccttaaaggcagaaattttattaactaatcctatttcttcgttactatccgacctgtaggataaatcttctttatataaatcgtcttctttaggactaataaggtatagaactctaagtgatatgtttataactctaatagtttttccagtgctgtctgtaagttgcttagttcttatattatataagatatcctgttcttctaggagtttctatataccgaataatttgctgtgacctcttaggctatagtagccttttattaggaaggtgtatattattctgtctttaagacctactttaataaggacctctctgtgtccttcggttactactctattaccggagtagtcctagtaggtgtataccgattctgggctatcctcctggtatatgtagaaatcttcgaagtcgtgggtaagtattttgtctaatccggtattaattagctagctgttgaaactatctatataataagctgttactgtgatagctatattatttcgccctttactttgtagtgcgatcgagtaattctatatatataggctgtgtgtctagtgtgcgggtagatcttctaatagataggaatacttttgagctttatatggcccgaaactgtagtaggtatatatcccgctcttatctctttatattccttccttcttttccttgatatacttgtggatatctttactaggaggtagttggtttcgaagggtctttttcttcttaggttcgttagatatacttaagttatccttcgaagatttgttatcttagcttaaggaggtttcgctattacctcctttaccgcctctcttactacctcgtcctctgcgtcctttactacggttattaccctattccctcgaggattgggctgtattagtagtcccttctctatcggaaactatctagaggctcttataatattagtctatcttttcgagtgtgattttcttaggtttaatattactaatttccttgataataaattgaaccttagatatttctttatctaattactatagaacttgtgatagtgtgtgaaaagggtatggttaaattttaaattgcaaaagaatgtggtattatttctggtattctgcaatgaattccttcgcagcattaaagtctgcttattttattttgtcgaactttttagtattatttgacacggtgagcggggggccagaaacggctcccattgcaccgccgtcctgccgccctcgaccgcctacccgtctccgccacttacttaccatttacggcttagcgtcctcatactccccccgtttggggttagtgcccctctggccgcttttatcgcgcccaacgcctgccctccatctataaaacaccgctcgtcctcttcgcagctttgtcgacgcactttcactttgttttcccatctggccccctttccctcggcccccaccaacttgtccgcactggcttgccacctcatgtaccacccctttcatttccaccggggatgccgctcgatccaccgttgagcccgttctggccggcgttgcctgcaacgcgggccgatctcttgcgagttgatgcatcgagatcatgaaactcatgaagataccgtgcaatatgatgctagcttccgcgctaactgctggttatactacgatgatctcgacttgtcctcctgttgcaagcctttctcgccgagcgcctcgcacatttcgcatttcgtacatttcgctggtgttccttgcgcggccaaagaacaatgtctcggaaacactcggcatgcgcgctctgatttgccacagtccgcgcgaggttgcattgtccggcccccaatggtgagagtgcagcctggtccgctcgttcgagggtgcctcggggtaagactgtcgtcatagtccgtttcacttggccgctgttacccccgctgttacccaatcgacgaaaattcggacgactatgccattgtacggactaatagcgaaattgccgcattcttgcctgatctaaattaacgccaagtactgcgtcaccgaggccgacgatggtctattctacagacggcccctgaccacgcgcatagatgggcaactggaaactgggctgacgaccactatggaactaggttacgttggggcgccaccgaggtgtgcggaagcttttgccgacggccttcggtctctgttgagcagccggtgtggctctgcgccttggatgaaacgcttcgggctgaatgatatagagggaattctctgcaccgcttcactggcaattcttatctataaaagagataacaatcctctttgcatggcttatgtagacagagacccatcaatccttccccctctccctttccccttacccctgctctgtatcctatacccccatttctgagtgccccgttcttataggttcgaaatatacctataggattcttctggctatctgccttttcacaatatgtcgagcaccaattttcgcctggaattgtttcgtccatggaatcctttccaagacaaagcttagccattgcgtgatccctctgggacttgtcgctacccaagtccggtctcgatcactgccaccccgctaagttccaattctagcgattatggcccaaaaaagcaaaatattctttgccctaaacctgagcgacacccccttcctgcccgcccgccgacggaagtctgcttagatgggtagaattcggaggtttaaaccactcgaccgggatcggagggcttgggccaaacactttccgctgttagtggtcaggagccctttaacttcgagaacatcttgcaaccacaaaacatagatggtggcgatgatgtcgcttctccaagttttgccgatgatatctattgggaaagagagcgtgaattcctggaattgggattggatggctcggatcctgtcgattttgcccgtcagtatcctcaaagtgttgatcttggaattcctacttagaatggagagcttctaaattttgagaacgtcgatcctgcaatccttgatgaccatgaatctccggttgccgaacaggctgaaataactatggatatcgctagtatcgtaacgcccccggaagaatgccccgcggtgtccattcgccctcagaacaaggtctcaactctctatcgtcgacggaatttaaaggggatggtggacagtgaccgccagcccacaaaaataaagaagggtttgggtacgggaaaaggggatataaggattggctctactcggcctaagaaaagttcgggtcgtcagagcacttctttcactatagtctgtgcccaattctcggcccttttagtcgaagaccgactacaattcctgtcctggctttttgagggtgcgttaactcattgtgcttctgctgttgcttgtccctcaatctaatgtgatggtagaagcgataactgtgtttatacgagcttgaatactgacgcgactgatgtgtagcacgcctcttcaagaaagggactaaagtggtctgcggaggaagatcatcttctaaggaagttaagggacgagtaaaccctcgcttggtcagaggtggttaagcaattttcacgagaatttcctgggcggagcgaggggtcaatcaaagtgtactacagcacaactttgaaaaaaagacggctatcttcccctattgttcttattgcttgacatgattaacataagatattaccggtagaatcgtctggagtagctagaacattatgagtggggatgctcagttgtataaatgcatagtcgaagacatggtggtattgtgggaccggtggtctggaatttgtctggaatttgctcgggtatcataatatttatgttgagattttgtaagatattgaatctagtattcacttcctgttggtgtggtataactgcagcagcgttggtcaaatccgagttttagtacggaggcacataggtttccattttgaaaaataaaatctcgatgcgcctattagctcgaactagaagagggtaccaagacgctggatgcctggactaggtaggatggagaatggggcattaatgatatgaaacgctgggatgtgtattgagagttacgctatagttcttccggtatgtttgttttaccatatataacacgtaggcgttgggatgggtactgatgaccatgtacgacaatacaatgcggagaactcgtggtatttttcccctcatatacgattacataatcccggcggctcagggttggctcagggtatgctcagggtatgctcagggtatgctcagggtaggctcagggttggctcagggtaggctcagggtaagctcagggtaggcttagggtaggctcggagttagctcagggtaggctcagggtaggctcagggtaggctcagggtaggctcagggtaggctcggagttagctcagatttacttcaatgacccaatacctcggtaggtcaatcaatgaccacgcaagcatcaataaagaattatggcattgccatcgcgttcccgctgctcaaaagtcccgtagcaaaaatggaaagagatagagaagaaaaaaatccccttgcgcctttgagattattctattgtagggatgatttacaaatgggtatcatacggctgagcttttgaagctatttagggaacatgggcgggccttccactgtgcaaccgtcgtgggataggatgaaagatgccttcaatactttcgattggtggcggagacgaaaatgggaatcgcgaagaatctggattgtgtcttgatataacgctagagagccttgacactatatatcatgcgaggtgatcattgatgtcgcattgtccaggatagataatcctaagaccagatgtgcggctatccctttaaaagttaccgactgtggtgccggcgagtcagttctctctgttgataagcgtctcatcagagcatgtatgagtttcttgtgattatcattctaatccaatggtggtggaagggattctcttttattcagcacaaggttttttttttttttttttttttcccttttttgagaattgggccaaatacgaagtgaaaaattgatgtcttgatataacgctagagagccttgacactatatatcatgcgaggtgatcattgatgtcgcattgtccaggatagataatcctaagaccagatgtgcggctatccctttaaaagttaccgactgtggtgccggcgagtcagttctctctgttgataagcgtctcatcagagcatgtatgagtttcttgtgattatcattctaatccaatggtggtggaagggattctcttttattcagcacaaggtttttttttttttttttttcccttttgtgagaattgggccaaatacgaagtgacaaattgaaagaaggaacaatgaggaattagcagatgtgatagaattaaaggattgatgttgacttattcaattgttttcaatcttcctactaaaaccccttgggaccgcttactgtagtctctagtctccagcagtaagcagaccccagggtagctgtggagttctcacatatacgtagatgggggtatcattttccggatgaatagtaaatattaagaaatgctacagtcaactctagatacaagatatagcgcgagaaagtaaaagagacaggcttcctcgcatttaggggaacactatgtgggtcccgcaggtcatatccctatttagcccgtatgctttatatatatccttaacagcagctgaggcaattcccgggatgaataatgcaactcccagaatactcttcttgtttactatatatcgagaaatccctttgttagggcttgagtatattggaatttccggtatgtcgtcaacgggcatatattgtgcctttttggccggctggcgtatggtatagcccaagtatcagcgatccgtcacagctctacgaggtatccttagggattcactatgtgtatcctagaatgcatggtcggtactgtggagaatatttcgattgctcctagaacgagagaaacatttcctgggagcttgtcctggatccacaatccgactgtagttattaaggaatctgacggtatattttaggtgcaatagcttatgaggctagtagatattataagtagtgttcctcctacatttaaatctccactagtatatacattgccgtccgttgtttcgaatatacagccagtacactcaactttctgcgttatagtactactatcgtaccacttacaagtaccacggcttatctgtcatatgttgttgtacccggaatttcgaatagtgactatacattttgtataagaggcctagattaatagcgtgacttcttcagcctgttctccaattcctctaatatgtctcttcgcccctgtcagctatgccgatattcgagaattcgatgcagccgtgaagttccttactgttaaacttgcgttaagcgtggtaggtactctttgtgcgtctatgaaacaaaagtgtcagaccaaaaacctgctcttccagagcctcggtcaaagtagtaaaagtaaaagcaggaacgagcatctgacgagtattactttcgacggagagcttttgagccataatccgaacagttttcccggtacgaaacgagtataaatgaagagatgtaatacgtaatggagcctgtaaacgaagaatatatcaagcacatgagttaaagatattctgagcagggcagtttattaccttatgagaccctactaaagggtattgcggctgcgaaagcggagaaagcttcgattttctaaccgaaacatgttgaagatacttctgaacggccgcggagtataccagtgcctcaattaatagagctctatgcgtaaatgatccctccggtaatcaattctaactatgaggaaatatagactatgacgctaactgtcaataaggcttctttgcctctacgcctaaattttgatctgaccatatctgggagatatatttgcggcccacatacggcctattagctcttgttggtattacattatctttttatctctttaatgcttcctgtagatataggagctctgtggaaagttatatgtcgccgccactatgactgggaagagagctttgtcctgtaacacgagcagctttaacagtggctcatcagtgtccgcaatatcttgaccaattctgatgggcttcatacagtaaccttggaagacatagagcgccaaacaagatatattctgttcattcttggggagaatatgtccccccactcgagctttatatttgaatgttttagaagcgaggaacccctataccggccgtttggggtgagggcaagtattgctttgatttgttatgcctttggtggaatctagtccgatgagcttgaaggatatgaagcaaaggaaatttggacctgcgatcaaaactttctgtcgaccatggctttccggcttaaagaatcgctactgtttggcgccgaagtttcagtgaaccatttatagtctatgatactaggtttctagaaggcttttcagtgcgaagaaatctgtgtttccgggatggagttccaaatattaagaatcgaaagcgaattagaagtgctgggatattaccgatgggcatttctagcttttaacccaattcttttaccaaagattctagcctctttgagagaagtgaatgatcttactaccctactatggcactatcagcttattaatatagagagaaacttggacagaagtaagtgaatcgatctttaggctgatatggtgtttaataagagtatagccaatttggccttacgtctcgccaatatatttatatcactggcaccagaacgcttggacgctgcgttctagaatactcgcgagattcagctatcaaaagcggacagagtcgtcgctatggagatgatgtacgtcaagttattcgaagaagtatacaagttgaaccctactagtaagttcttatattttaaattagaaaaaggaatttctaattgttacagaacctactactgtccgtgttttctatgtttcgccgtgaaaatgcgaaggggtatcggaatgcttctcttttaatgaattcaagagttgtatactataaggaatgtgttagaatctgggatttgtgttgaaataatcatttacaaagccttacgctccggaaatgagtctatcgaccttgctcttacgaattaaccttctattgcttcttataaagggcttgaatagaccctttctccgtcctcgtaaatagccattaggatgtataagaattaacagcgccttttatcttaaatgctagcccagtgacatccctagcgtcaaatatgaaattcattcgatgagagcctaccgagctgttatgaactcgaaggaaaggaatcgtataattaatggaaattcaccaagtgccgaatatggttcgtaaaactgcaaccgactatttatataagatatagtacgagaaatccaaagatagagattacctatatttagggagtctatatgtattatataggtccggtatattatatctctccttatattatagttttatttgtgtatgtccctgaaacccttaagtctatatagatgggacagaatggttagcagaattttagttggactggccagccttttatcttggaagcctttttgagaatatcaacttgtaacgagaagtattgttgaaagagtgcactaaatgagatacacgcggtgaataaacgctgataacgaagatataacgttaatttaattagattaaccgtggctttctctaaaatgtgtattgaaagttttctgtgctagtaagagagttgtaatgtttagtaaatgtatagaactattttgtggagcctattaaactttattaattgtagttcttgttcttgtggaaatcgctttcctagattatctttatggtaagctaaagttgaatattcgtttagtgtctggggggatgtatagaccgaatagatcatcgggaaacattatatgttgaagatgtgctatatgttcactatacgtgtactaaagaaagtcatctaagtcaatactgtacgtgtatattaatattgcttcctccctgctgttagctagcctttcaatttaagtatagtaaatgctggaaattctcaattcgtaactcagttccctactttattcttatactcctactttggttctacgtcctatactaactaccagaatgaagaccgttatatccctttttatactggctgcctctgctattattacgcctgttgccggtactttatcccctgggcacttcggccttaagtctatcggcgctactaaccaagagtataataacctctatgtttacgcatactatataggtgtaggcctcaatgatgccgtcctgactaaggatgtgaatgccgctagctccgtttacttgaatggcataaatgccttcttcgatttgaatactgaactgctttggggagttgtagctaccggtgataataaatatatatgtgagtgcctgcccctagaaagttgtgtactaattttgatatgggctaacgaaaattccacagcctgggaacgaatcttgataaacgtaggccaaggaagcaatgtatttttagccgaaggcagtagctttatatggtcggaagccagcggcttcggtggatggctcggtaagaccccgttatcgttgctcttctctagaagcgatctcgtcctgatatttcgtagtctgtaattgttattacaatgcgccctagctgttctatttgaactgtaactacaacgccactatcccctctagctgcagtaagatctaactgaaggccgagtatatcaattagctttagtagaattgggtttgaccgctttctatagccctatttattgcctaatggcttatcttctactagtctgtagcgagttcgagggaaaataatatgaaagcgattactcaaatttgaataaggctagggttggcttctatgctatgcgaattacgctagctaaatgtcaggattctaaatatataaatacattaagagaagtaaaaggtggaatgagaagcactgcgttatatatggttaagtttgactgtctctaccctgggagcacagaagcagctttaagaagcacaaaagtcagtcccttaaaaagccgacttagcttccaaaatcgtgttctcttatattgggtaaccacagttacgttcttatggctagtttaatcagctcctgggttattagttgaggtttataggtctataactgggccttctgagaacgatcgaacgtcttaggtttgtgcggagctctggtgagggtgtcgtgtgaggactctcctcaactcttagaggaagagattgactctaggacttagaagtagggtagggttctaggagtgtagcagcttccaaatccattctatctaaacctaaacttagatttacttaggaacgtggtctgaagattctaggggtaaacttttagttgtacgagatatatagcttctatacctgcttttgaggtttatacggctaatttaataatctctacggcccatttagcctatgtacttaaatgttcctttgtgcttttagctagtcctgaatcttcaaagtcaagtgactctctacttcatagctcaattctctatttcattatcaaaattccagtataaaccataatatatataacctatatcttctaacccctaaaatgaagttcctcgcattcttttttatgctggctacctttgccatcgccgtacccgtcgctatttcgtcctctaagcacttcagaccctcagtgcagtaatctgagtaccttaaaatcaaagaaaatatgattgtaacttacgacatggtgctatacatcgtcatacatgataccggtcttgagaggggccagaatctgcttcgctatgatcatattgatgtcaaccctaaagaccggtggctcgaggatattttgatgttggtagctaagggtggacatttccctatcgcagacgggttcgcggtggatggcagacgaaatgttggcaatttgaaaagaccgttgtattctgtgcggaatgcattcggagggccattgagagtatgatggaataccacaactattattaatactctttggcgccgttaccgagaggaaggtttggtggtctctaagatatggtagcattaatttcagatagctcccgtgatatgcaaggtgggcttttctcggtataaatactctttgcatattattgaggtgtatatgggacagagtagctaagtgccatatatcttaatgcggtcttccatatctcccagttatgtattcgatttgctaccgtttcctaaaaagtatatattagatatcgcacaacagtttgtatatttatactcgtatttaccactgacgtatttgttaagaggaacctcaatccttttaaaatgatactgcagattcctgtaaatgtacactagagatatttctgtggtaatgtatagtctacagatttccagaacgtacgagtgcatcctgatttaatagacttagtgcttacggagcggaccatattgtagttattcaatggtttatataaaataatgtacagtaatcgccgtagacaccttacttgccagtattactagcacaaaagccgggctgacccgatcacggagctgtgtatatcgatgtactgggttccaagtgccaggaaagagactgttaaggaaagaccagtattgtgatgcatgccgtttgtggtgaatcttgaaaataaaaaccctgagttaatgtgttctgtgcgaatctgaaggctgatgaaacctgagggaaaggttcgtataaataagttgcggtctagagggaaatttgaatgggggtgagaaacaaagagtcgcgtcgctaagcttgtgtgacgaccagctcttacagtttactagtggtgaaatgaactaactggtgctggttcttttcaactcaacttcagatataatgttaaagtctatcactagccagccgttgggggtggtaaagctggatacattgcccctgaatgccgttgcttaccagttgtttcagcttcctagtattcaccattggttgaagtctgtaagcgatatatatacgtacttttgaaatattcgcagtagtttagctgtttccctctatgttttacttcttgcattctggctgcttaaaattcatctattgtggacgtctggcaatccagtaccgctgcgatctcgagtattgagctttggaaggctaggtttatcttttaatatggagattgcgggcgctccgaaagaatgtatgaggctttattatcgaatacagattgcctatatgaaatcctttatacttggctcttgaaggctgggtgtgtcaccagaaatcccctcagtattcaaagttagcattgattttttaccagtaatgtaacgttaattatgtagcattcagttcacaggagcgcaatattagccagcagagtaacacaatgaattatgccgtgtaagaaacaaaaagctctaatgtagtaagagaatagtaggaggggtgtggaatgttggatattggtaaagcctacgactaggacgagaatccgcgaatatccgagagtgcgcgctagatctttgtcccttagcaagatttagaaccggggtcgtaaatacaatttaagctagtggagagcagagctgctcttgcaaggaccaccaaatcatcgcttgggcggtgcttccccgccagtaggggttgctactggacattagcgaaacacgataccttgctagtaggactcacatttctcagcgatatgattgattctgccgtctcggtagcggacaaaaactccacagcggtagaatctattggccatcgctctagatcattcacgccaataacgccttgatctttgccaattttctgcatgagccgtatcatgatcgacggaagagccgcaatatatgctatttcagattgctttggcgtgcaatctatataaaggtccaaacttgctgcgaaacgttagccagataatgtaaggatgcggtcattaatagacctatcttgatgatcccgttaatgccaaataatatatcaccacaggccagtgattggtgcgtaaggccaaatgaagataagtagtaggtaccatccaggatctaaaatgtcagaacagcttatcgaagggcatgagggaccaacctggcagataatggatcccaattctgtctcgctaggataaacagatggaaaagcggcaacatgcgccagcgtcagcggcaagtcgtcaactaagaagaacgcgagatcttcgtgcatgtagcattcatgtaaggagagaacgttcctgttttctaggcgtccgaatctgtaaatcaatcttcgagcattctctttcctgtatgtccggatggctaccatgcgagacgggcgagtgcggcgtgtggcaattgtaactttgccagcattctcatacgtaatgactttccgataggtatcccacggtgactcctgtcttacaatcaggacggatgcgatattctccaggccacacaagtggggtaggcaaaggcttttgggaggccccgtgacaaccttcaatctaccgcggcggtgaggttctgttagtttcgtagtggccgccgtatgactctcgcgggtggtgggggccgacatcgaaatagggagctgagattgagctttgatagtgccaaggtcacatatcatattgttatctttcaataggttggataacatgataacaagacagtgttttctcgggtccaaaatgtgcaagaactaagagagaaagtggaattccatttgttttatacgcgcggtgttacgggttcgactctcagctatgataggagatggcagcttcgactgactatcgtaagataaggccgatgagccacagcgcttacatacaaactgttgacggcatatgtatctttttccaactaacaataagctgcacagccatcacgaacatgaatctcgagctaattaaggattccatacgaatcgacaaataaccgcactactcaacataactcaacttcctcggtgggggccgacatcgaaatggggagctgagattgagctttgatagtgccaaggttatatatcatgttgttgtctttcaataggttggatgatatgatgataagacagtgttttctcgggtccaaaatgtgcaagaactaagagagaaagtggaattccatttgttttgtacgcgcggtgttacgggttcgactctcggctgtgataggagatggcagcttcgactgactgtcgtaagatgaggccgatgagccacagcgcttatatataaactgttgacggtatgtgtatctttttctaactgacaataagctgcacagctatcacgaacatgaatctcgagctaattaaggattccatacgaatcgacaaatgaccgtactgcttaatataactcaacttcctcagaatcttgttacccttaacagcgctagggaatgatgtctacggacagattctaggtttcctatgaccgataacgcgccaaaaataaagagacggaagctattaagcgagccagagtctgcggcagcttctttgtaatggcggccttatgtttcgcttatgagtcaacgagcgcatcggatcagatatggtatggttattacaataattggtaggtctatgaagtggcaaacttgccagtgattattgcgttgcacagagttccacttatatggccatgtaatgatcactcgcaacttccatgcgaccagtatctagttgacgctgtaacgaccatgttggccaggtgaagagagataatccggtggacttatttatggctaggtatgcctttggcttggaagctcgcttttcagtagggcgagtcgctctctcaaaattctcggacgaatactggcacagctggtttgggcctcggcgttctagaattacctgtcttactaatactacagtttaatatagtctacaactgatgctataatgagtcacttggattaatatgctgacatttagactcaaagtgacagctaaactgccgagttattaggaccagcagctatgagctgattaacagaatagtacaaatatttcgatacttgtagggcacggagctattgtactattacgaaggaagcgggttgaataatgtaaggagtggctgattttgatattcgaggcaatttgacttgcgaaattgctatttctttattgctatccgcgattggccttgtacgcgctgtctgatttctctaatatattgcattaattggagattaagatgtagctggttttgtatatttctttcttattcctgagcgtagtgacatcgcacaggaaaccgttcaaatcctttgcacctggaagtcccttagtcatgtactgatagatttggagctcaacaggctcttaaatgccgattaacggttgtataacactataattgctcctcaagttcaaatgaccggttatgctatcaaaatatagccgataaggtaaaaagaacggggtgtgtctcagtcatacagccgctccttgtctgcagcagtacacttccgatacttctcttctggctgtgttggtggggaatcagaatcgggaacagcgtctgtttctatctctttccttacgataatctcttcgtacctgctctgaagcaattgggtggcgaggtgtatagtggcctactccctgggggaaatggtgtcggagatcaagatgtggtcggatagcgtttgtaggtattgaattgtcttgttgaccatatccctactaatctttataaggcttgggggtctctttggatatatccgttgtgagcggcccggtatgtgagaggtggagtatgaatgtcggcgtcgcttttgtgggagggttgagggttcggctgctctctttgttgcgttcagagggggcgggtcttggctttcagcctttatggcgcttggagataacgtagatccccttgagctaccaagagaggtactaacggaagtaactgcctctgtagctatagggccagtggactggctaacaggcggttgtaaaacctggcttgtgtggctgcgattcctgtggatgaataggccaacgacctgacggaagttgttagctgattcattgccttcatgaaatagatttgttagccgatggattccttgagaaggggatctaaaataacgataccagttttgcctgtacgtccattgtgaccttctgtgtctggggtattggacttctttggaacctgtgataggttgtgatctatgattggttggcttcgctggtgatggtgttgtactggcaagctattggagcaaaagaaggacaagagagcatcaaccgtgggataattatggccttttaaatgtttggggctgaagtggtcatgcccaccatatccacagttaagaatttcggggttattattatcaccgccgactcctaggagaactatggatgtcaatatgtggccacaatagtggtacgtacacacccacgatcgaatcaaggatgttttaatccagttgccgtatccacatggtgctcgagcctccaattgattcgaagcatattccgaggagcaacatggctgccaaatcattgttgctcatagggcgtgtggaagggagtcccatttctcacgacttgggggttgatccgactggccgagggtgttttgtgcttccaggagctctggagactttaacttctttggtcataattcgttggtactgtgccgacatgatagtattttttgagtgttctcattcaagcacctttggcaatgtacgggtggtgaatgatgtcagaaagttgaatcaacgttcacaaagttgaacataaaacacccttgaacaccagcagcatgtgagttttccgcctgtagaagatatccatctgagccatgttgtttctttgccaatactgggacctgattaagttttccactcgaagctcgtttcctaatcggccgcgttggttcacctaacggcgacggtttaccatggcttagagacgcatcctacactggctgttaaacacaagctcaacaaaagagataaaaaagagatgactacatctttctggggactgttgggtaggtttgcaatcaacagcaaaccgcagtttcctcgagtacagcagagtgatatatcgcaaacagaccaaggcaaactacgtcggtatcagacgttcaaatttgaaagatgtcacgcgtaaacacgacacatattaaggaggttaataatatagaaagagacgctgtccgtggttaaaacgggcagatgtagattgccaccacgttgagcgatttgattgcaaatccagcgttatgtagaaggaatcttttttttgtgcggtgttgctttcttttcaacagttgatggaagtggtttaccacgctcaacgcacgattttgagaggaatgattccaggtcgagacatgactatgggccacaaggtatccaaacaccatttcaacgtcgatcgaatcatctcaacgcctatcaacgaggcagtgattatcgctaccatctgcgcaactggttccatcgagagacgtagcggaaaaaatataaaaggggccggatgccccaaaaaatcaggacttcggtcctcacactttgatgcatcatagtgtccctttcttgtctgcaggcttgggagtctccgtggccatggctgtcgctgctttgagccccgcgacgttagaaaggtgttttgcaggataaggtctgcgttaaaaccaataccagagcctactatggtctacaagcggtgccatattggtttatctgaatcaatatgcggacatttagacacagaatgaccgccaaacggtcgagttgtaagaaccagcagtcatgagccgattaacagaacggcaaaaatgttccagttcttgtagataacacagcacaaaaaattacatctctacgagcgaagcggattgaataacccaaagagtggctggttttgatacacacacacacacacacacacacacacacacaatttattaacgcccggcggctaagccgaaagggcaactatctctgatctactatacatgtcataatatatatagtactgtgtctcctcagagcccatacataaagccttgcaatatatgtcatctcagatgtccgttagtaatttttgacggcatacagtgcgtcccgaaactggtgccaccgctacactctttcgttgtttctcgaatcacaatgccaagacccgctagtctctgtttgggaatttttccggagtacccctgtcagttgggcgtgtattgcttcttacgtaggttactactttcaagtatgtatttgcgtgtgaatcaatacgtctcacccaccttcaaaataaccacccgacggagggtatcttaacgatcaatcaccagtggttgaatcaagatgaccccaaacctagctccctcaaagcaagatcttatttatgacatgatacacggtggggagctgtccataccgcagatggcgcaggctgctggctgcaaataagagtaccatcctgagaatctcttccaatatacggatgtttggcagcgtcaaagcaccgcttaataaaggtggacgacaacgtagcatcactccagtcatgcttgaggcgttgtgcgatcacctgctcgaaaagcccaccttgtacctcgacgggatggcgggggggcgagccagcacgctcgcttctttccaagataatcggtcatacagctgccgggtgtgtttgcctgggagtgctgcatcaactcgttttgcgtgttccctacgttcgctggaaggtcattgctgtggactgcttgggaccgtgcgatattcagtgtagttgacttcattctcgggacgctttcttgcgggagagcatcttcttgtgtcgcggatctggcctgttctttagccagaacgcgcagtttattgtcttcgctcgtagagatccaccggatattgatctggtttccatttctccgtagctttctcatcaacttgtatagttggcagacgaattcctggcctgactgttgtcgaggattccttagtgtcagagccgccgctttgttgctcgtgagcagcgtaatcctgtaatctttcagtccaactaccatgttcaatgcatgtaccatcgctgctagctccgcagagaacggattttgctctgttcttgcacccaatgtaacggaaagggtcttcagtttcagttttcgataccgaggtggctgcctctcgatcgccaccccaaatccgaccagctcgttccgtgccgaactgctggttgcgatctgcactaacccgcccggtacggtcggtgactgcggagtttcttcaacgccatcctgtacgcgtgcttcccatggtgccaatgtgaacggattgatggtttccagtctttccatctcaatgttcttcagcgcgtctgctacttgatacaacggcgaacgatggtatcttctgaatttcttgatccgtgctgtattcctgcggagagggttggtttctggcagggtatgtatgtccgtccacatcttcacggctcgtctccagaagcggtgttgaacagtggcaaggtgggcctccgcctctgctacactggtcgcaactgtgaggaatgttcttacaatcgcctgcgctcctaccctttggacgcggttgatcgaccccatggccttatctttgcacgcgtgcatccagacattagacgcgtagtccacgaccggcgccaccgtcgatgtaaatagctgccgcgctgtcgctggggataaaccccgaagtcgtcgaagctccatcgcggcctccaggcccttggatgctgccctcgcaatatgttccttgtacttgagtttcgtgtccatgaggacgcccaagatcttgacaatgtaaagtagtgaggttctgatgatgcaaccacttccaagcattcaaaaagctctcttccagcccataaagtccgaaacgattcgactgaataccttggaagaaggcaatcttttataccgtcaacatggacgctcataacttagcacaaattgctgcaatctcgtcgtcattttggctgtcgggtatgtgtctatcttaagaaaatacagaatactaagtatgtcaataacacaggcgaaatattcacctactcttggggcgtagtgcccgcagtcttggaggcctgttcaacctcccagcattttatcataagggacattcgctagggccgcctttcgccatcctgggagcagggggctttgtatggttggctttggagtcgggttgttggttgtactggcgggctgcaattctcgatgttggtatcgttccatacaccttcgctttcgtgatacaaacaaactcaagcatattcgagattgcgaatgtgaaagactcgtcggaaaagcccgccagtgaggagaaccggctggctccactgctgaacagatgggcgtgtcttaatactgttcgctcgcttttcccattggccggtggtattttgggattggtagcagccttgtactaatcttgttgacttcctatgctggattgaacaaccgagtcttgtttcgttagagacaacctgccataccgctcacatcaaaatgccaacaatgtcccatgtccataattatcttagcatatcatgcatagtatgtgtcgtattggctttctgcatccaggaaaacagtgtcacaatccccttgtccacgggagtaaggccctcgattccacgcccagtgtcgaaatcgtggacatacaaaatgacgcgcaagcgctacccgtccactttctagatccagggaccgctgacatggtgtcccgacggggcgcttttggctggctgtacttgggtgacccaaccacccattttccacgcgcagtatggacggtatccctcggatagcatatctgccgggccatctggggggtatcatgtagctagctttcatactagatagcaagagcatccccagtctcgcgaacgacggcgtgggccccatggtcagcacatttattcttcactttctatagtatatgacgaactgagagagtggtcaaataccatgggccgtaaaagctgtacctcacttcacttcgattgttactcatctacagtgtgttgagaatcaagcattctccaatacaccggtggatcaatgccggtttcagaagccagcttgcaccttccagaacattgcggaattcaatccttggacttggtaaactctactactcacactctaggattgtgcaatgccattattatggcgtgcatgctactaagcttagcgaaaataaaagtcggattattcctgtattctagacttaagacttatacacatttccaatcataccatatacgttcttgaatctcattgagttcacacctctggttacacgtagtattcatccgtcttgtaatactttaacagagtgagctgcacatgctcttaattgatcccggatagatggaacaggagagcatgtcagaacccaccctttgaccatccagtggacaattaaatacaaattgagcccgtgctctactctagcagcccattttccctacccctcttgcccccaagttggaccgttatgccgagagctcgacggagatgaccccgattaggggccagtcctgtagttgtgcgtgattctcacccggcttttcaacctacttgttgttcaatcatccttctcacctgggcgacacccacccgactattggccgcacatgagccacacgccggtgagttagtagttgggtgggtgaccaccagcgaatcctcactgttgtatgtttttcgtttttgtatgaaaagagatacacgcttatgttatcctgaacgaaccttggcacacgggaggttcgcaacccagaaataggatcgtcttcttacttaagaatttatatactgaagaggggacccctgaggggcaccgacaaccctgcctgcgaaacaggtgtgagaacagagtcatcaatgggagtagtagggtgctagagaggagaacaccatggggtgactaccgagaagagaggcggaaaggtgtctgcgttgctatctaggcctcgggagtgcttttatgtcacatagccgcttagtcattctgctctggaaacccccactgcaatacatacttcaatatatatatcacgcgataatgctaactacgttctatagtttatatagtatcgctatagttatacccgaacccactactaagtacgaggggacctaaaacatattttaagtactatgcgtagactaggcccgcggctgtactaactcaccattatgacccctagattgcttgagctagacttattgtactgggcgatcagtaagtagttctttgtgcgccgtggcttaggtctgttcctataaagcgagtcgaaaatcaatagccgaatcctcatctcgccatcacctttaagccagaagatagtgggccagaaggtagtgtgcccttaagtgcaacatattgccgatacctcctgtacagagatctgcatcacgtcttctaagggaaaacccttacgtcatgtcatgtctctatcaatgttcttgcactagcagggtagcttaccatacatcttgcgagccaatcaaaacattaacggcgctacagatgaggaatatcacaaacaaatggttttcctctgtctatctttggccgcgatctaaaaataaaaccagaataaataaatcaaaatcagataagactgacaaaaatgattcggcgacaagcggggtagtctaaagacagaaacttgtgataatcttaattcttggtatatagcaaaaatatttctacactctggtgtgcaaggtctattttctctcgttgaatctttcgagacaaaacgtaggattttctctgtgaccattgaaatatcaaactcaacctccaacgccgcgggacctcctctggcgactgatcatatgaggctaatgagagccacgaacctttggggggcccacataccaatcatgcaccggttatcccttcgcattatgacatggcttaagatcattccagtggcgcaagaccatgcgctgatcttagcttgaaataacccgccaatgaagtcgacatctgaccattgatgggactggaaagttcgccagtcggcctttctcaatcaagaatactaacgcatcttatagtgctatccagagggaaatggaaaacgaatcagcagatgtgaattgctacctacaatgtctaaaactacattttcataggtcggttgagaggaatggcccgagtaacaatcaaagtatgctaaaataccttcgcagaaggtgaaacgaccctaacattagtgtagttacatcgcatattagttccgtttcccgaaatatcattttcctccgactaaaatatatatatagccttctatcctgtctaaacaacagggtaaatattttacaattctgcgtactggcaatatccactgatgtcttcattaatctttgaaaagtctctccaatgtcaacctcacgattttttccggtcccaaccgcctatagggccttttcgcaatcataatgcatgctaccttgctatccctggtactagtcaccccaatagcgggtgcgatgaagccgctgcaatgaagctactatatccaaccaagcactcaactaaaagcaaggtagaggtgaaaagaaggaggcacctcattgcaaaagtcgagattatttcgcaaattctcgtcgcaaaagcgaaggaagcagccgaaagaaaccaccagaaccgtcaagccttgcggacgaaactagcaccagaactcaatcaacgcaaacggagtaaccagttgtcctccagcgacagatctggtatgcgtgatatggatgaaaattttgaggttctatctccacgagatgtcagatccttctcattcatcctcgaaccaaccacgaagaagcggttttgtcgaaagaagatcgaactctggttgccgaaaaacccacacgagataacgatggacttctcccgtccaggaatggcacttcttagaccacagtctttgacatatgctacttctgggcccgctaagcagagcttatcatctaagaaatcctcaactaccaaaaagtctgttttgaacgcaatcgcggagccacgcatttcaaccactctgttcattggtgaaaccacacagtctggttaccagggcaagaaaaagcaagcggatttgggtttgtgttgggtgaccggaaggcggtcacccatgtagacccagatcaccatcagatagttcggctccctcttcctctctctctctcccttgtccacttttatcttagcgaatcgacaatagttgttttccccttttcaggcacaacgtagtcagatacgccattaggttatgagcacttgtctctagctagcaaggaccgctagcaacctccaaccctaagtctctttcctggaccccacttcccggcgcttaacccgcacaacgcgcgtttctcgccaatcggatttaatcctcgcaagcctcaatcaacaacagaattggcaaaccagctctcagcatggctgatagcggtgtcgactctggggatgacaacccgaataatcagtcacaatttttgccatcaggcaataacaacgcgtctcgggagataggaaacacctctcaaccccaggccaacacaatgtcatcgggtaacggatacaacgagaagaatcaggccactaacttacctgacatctcggctgcgaaaatgcagaaagtcaaagcactcgagtacaattccagaaatcctcgtggatgggcgatccctgtgaaattcgctctcgcgccattgagactggaatatgtcattgacagcagcatgcctcgccccactgtgggtgacccgaaatttgacagatgggagtactggtcacgcacagtggctagctggctgtacgttcaggttgacgatacactccaagaacgaatccagaatctctcgtacctcccggaattcgccgacacaatgttcgatgaaatcatgttaatggtgcaaggctctgacaaggccgaaaatgcgctaaacgaaacaaaaaagttcgacgaaatgaaacgagcggacttcaacactgcgaaggaattcattgcggaataccagaaacaataccacgttctttcgcgattcaaaattcaaccacacccttttcacgcactatcacaagttctacggcaattggataaagaaatatccaaggttcaattcatcatcgaggagattagtaatatcgaacctaagaaaatcacactcgaaaagatggaccaatattgcaagagcctccaggcagtttccgacagagaagggactgctaacgcagcccagtcctcgaggggacggggtaacaaccgcggcggaggacgcggaggacgaggtggtaagaggggcggcaaaggaggtaacagcgaagcctcctcaagccaagacaacaaatcttcgaaggatgactcaagtacatccaacgaacccaagaagaagaagacccttcgcaaccaaccacctcctggtaaagatatccatgagtatgtcaaggaaaagaaggaaggaacacaaagggatgagagcgggatgtgtgcctactgcggtttcgggccacacaaagctcaaaagtgttcctatctgtcagaagatccacccgcacactggacacacagcccacacgtatggaattactcgatcgcactgcgaagcgaggggcgaagcaatatggccataacggcaacagctcgtcacacagatagtttcaacagctggctgattgacaccggatcagacaaaacactcacccacgacttcgaagatttctacacataccaggaggacagcccggaatcggcatacgcctaccgggactactccggcaacagagtggtaactgaaggacacggagaggtccttgtcaaagcaggtctcgaagacggaacaacatacaccttcctgacaaaaggctactacagcccaaggggtcacggcaaattgttcggcatgcagaaactcctggaagaacaggatatctcgtatgacacaagaactaagcgacttacagacggcactggaaaaaccgttggagttgcaaacacatcactcggggttccgtacctcatcggtcctaaagaagacgattcacacgaagaagattcatcctacgggtcggacagtgacgaagaaacaggattagtcaataaaatttctgcctttgaggcgcatcgacgctttggacacgctggaaaagccaaacttacttcaacgctgaaacaagcacaagagcttgacgacgaagaacagtatggaacagaatacttcgactgtgaagcatgttttcaaggtaaatccaagaaacagatttctcgtgagccgcaatttcgggttcaggacgtggcatggaaatttcatgtagacacgcagcctatgaaacctgagggcccgaacggtgaaaagtactggatgcctatcctcgacgacgcaacaagatatctcgaggggccgactctcacgaacaaaggtgaagcatttgtcaagcttcaagcattttgcgaaaaaatcaaactccgaactgggcgctaccccggaatatggagactcgatggtggaacagaatttaagaacttcatcacttggggcacaaaaaagggaatgactttcgaagttacaccaccctacacggcagagcccaacggcgcggtagaacgcttcggcggatacgtcaacgacattcagagaacgatgatcatcgatactaagctacctgaggagctgtggccctacgcagtagaaactgcaatctacaccatcaacagattaaccaacccaaagtctcaaacatcgccactcaaacactggcgcacagaactcggaatcgacaacccagatccgtcactgaagcacctcagaccatggggaacaaccgtctacgttcatattccgaaggagaagagagtacaggcacgcaaagccgctccaagatcttggaaaggacacctcatgggttatgagggggataacggacatattctaaaaatctggaatccggaaactaggaagattacaatctcgagggacgtcagctttcctcaaccaggggacgaagatcaggagggaggagtaccggtagcgccaaagccatcgaaacccccaggagatgacgacacaaacgaaatttccatcccgctgatcgacgcagccagaaccgaaccaaggacagagattgtaacagtctacagacaggatccagtaaccccgtcaacaattcacttgcccacaattcaaggcagcgtttcaaccataccagagaccccggtaatgcctcgtcgacagaggctactccctgcaccaaggcacacaagatcgatccttgggagacttcagagagggacaccaattcccaaaaacacagaacagttaacagcgcaaagagtcaaccagactcttactccaatccaagaggagacacagactgttcacagtgagaatgcaacccctcagacggagcaaattacaatgacagaaaagctagcagagaggaaagccaacttccagagaagacttgaggaactcacagctagaatcaacgcagaagagatggacatgctggaagtacaccagtacgcagactcgattgaacaggacttgatcagggaaaccagctccccacgagagtcaactccaagggaagacactccgtccccagaacagacaaggacagagtaccagtatcctttctcttcaccaactcaacagactccagaacgcagtgaacaacagatagctacgcaacaaacatcaacgcaggacacttatgaagcgcctcggcacgctgcgcaactgacgcagacagnnnnnnnnnnnnnnnnnnnnnnnnnnnnnnnnnnnnnnnnnnnnnnnnnnnnnnnnnnnnnnnnnnnnnnnnnnnnnnnnnnnnnnnnnnnnnnnnnnnnnnnnnnnnnnnnnnnnnnnnnnnnnnnnnnnnnnnnnnnnnnnnnnnnnnnnnnnnnnnnnnnnnnnnnnnnnnnnnnnnnnnnnnnnnnnnnnnnnnnnnnnnnnnnnnnnnnnnnnnnnnnnnnnnnnnnnnnnnnnnnnnnnnnnnnnnnnnnnnnnnnnnnnnnnnnnnnnnnnnnnnnnnnnnnnnnnnnnnnnnnnnnnnnnnnnnnnnnnnnnnnnnnnnnnnnnnnnnnnnnnnnnnnnnnnnnnnnnnnnnnnnnnnnnnnnnnnnnnnnnnnnnnnnnnnnnnnnnnnnnnnnnnnnnnnnnnnnnnnnnnnnnnnnnnnnnnnnnnnnnnnnnnnnnnnnnnnnnnnnnnnnnnnnnnnnnnnnnnnnnnnnnnnnnnnnnnnnnnnnnnnnnnnnnnnnnnnnnnnnnnnnnnnnnnnnnnnnnnnnnnnnnnnnnnnnnnnnnnnnnnnnnnnnnnnnnnnnnnnnnnnnnnnnnnnnnnnnnnnnnnnnnnnnnnnnnnnnnnnnnnnnnnnnnnnnnnnnnnnnnnnnnnnnnnnnnnnnnnnnnnnnnnnnnnnnnnnnnnnnnnnnnnnnnnnnnnnnnnnnnnnnnnnnnnnnnnnnnnnnnnnnnnnnnnnnnnnnnnnnnnnnnnnnnnnnnnnnnnnnnnnnnnnnnnnnnnnnnnnnnnnnnnnnnnnnnnnnnnnnnnnnnnnnnnnnnnnnnnnnnnnnnnnnnnnnnnnnnnnnnnnnnnnnnnnnnnnnnnnnnnnnnnnnnnnnnnnnnnnnnnnnnnnnnnnnnnnnnnnnnnnnnnnnnnnnnnnnnnnnnnnnnnnnnnnnnnnnnnnnnnnnnnnnnnnnnnnnnnnnnnnnnnnnnnnnnnnnnnnnnnnnnnnnnnnnnnnnnnnnnnnnnnnnnnnnnnnnnataagaccagacatcagattcgccgtcacacgcctacaacacagactagcaacaccgactttttctgatctcgaggcaatgagacacgtcgtcaagtacctcagacacaaccctaagacaggactgatctttggaaagtcggacgaactacaattcatagcattcacagacgcatcacacgcagactggacagactccaaatcaaccgaaggatgtatctggttctttgcgggagtcccagtagcttggtctactaaaaagcagacgatcacagcgaactccacaacaatagcagaatggtgtgcgctcgaccagccggcccgggatgctatgtggcttgctaaggttgcagactcactgagcctgccaagacccgatcccacagttatctacaccgacaacatcaattcacagttgctactgacaaagaagggaggcaagtctgctaccagatggctggcactccgatggttcttcgtgaaggacgccgtggcccaaggacacataaacatcctgagggttgacacaaagcagaacgcggcggacgggtttacgaaggcgcttcccaaagagcaattccgagctttcttgaagcttattgggatgacttaattcaaaggaaaatttggggttttttacgactaccacgattacgacattttaagatcatcattttcaaaacaggagatatgagatctgtaggggggatgttgggtgaccggaaggcggtcacccatgtggacccagatcaccatcagatagttcggctccctcttcctctctctctctcccttgtccacttttatcttagcgaatcgacaatagttgttttccccttttcaggcacaacgtagtcagatacgccattagtttgaacgaggtcaatccaattcaaaaattcaaaccttacgtgtcaaaaaccatcatccgaaacctatctgagagtcttagggaacttcttaccaagcctctctcgaaaagcgatttgaaattcaagggttcgatatatgtcttttggcaacaaggcaattttggatacctcaagattggacgctcggcaaatgttcgtcgccgtttcaaggaatggtctgatcaatgtaagaaggatatgggaattcactttccagacttcacgcgagagacaagtgatggcgagcgagttttggaagaggtcgcccatatttgtcgtgtcgaggctctggttcatctagaactgttggagcacagaaaaatcgaagagaaatgcccaggctgctctcggaaccacatagagtggtttcaagtctcagatgaaaaggcaatagccgttgcacagaagtggatggcttggatgagaacggaaccgtatgagaatcgaggaacggaaggtgaagaaaaatgggtgctaaaagccagagaaatggagcgactaggagagcttagtcaacctttatttcccaaattggccccagaatctcaggttcgggaagaaagactggcttctcttcgtcctagggcttcctcttcaaccccatggcgagatggaaagaacaaattgggacggagatcaatttagctgatacttcacaatttatacttattgaacccccgattatactgtgctaattttatatgtaagattagcgggttttccaatgcttttgttattaaatagtatatatattatctctctctattagctgccaagtttgtcttctctaaccatgagatattaaaaaccatgttccgcgttgatataagaaaccaatatatataggaggcatccttctactaagagtaaaagcctagtcattagtacgagttttgtgccaacgcatagttgcattcttcagcgcatgcgtgtggcaaagcaataggagccgtcatatcgtgagtattaggtacctatatattaaagcacgacggcagatgaagcggagttttgtttgatgggagctagatatcgccttccttcgactagacaaaaactcttgctcaacgcgaattttgaaatgccaccattttctatattacttttctacctactaacatgttttaaagaacccaagattcagagaatcatttagtaaatgatcttactgcctataattctagaagaaaaattaaagatcgcgctattagcgggtgaatttgacattcctaaatgactcctacccgccaggtcaaattatcgggctcctcgttcgacgcgctacccaaccaattcaattttaaatacgaaatctacatcgctagtagtaagtagaacacctgcatcaccttattactaagtgatttaggtatcccgatacacgttgtggtatcgggatacctatttgcatatcgggactagtatccggaaactaagtgacaagaatatggaggtataactgatttcgaaaactactgtactacagtacttgatttgttactcttaaccctaccgttgccgagctggcctatacagaatattttcttgatttaaggattcagtgaggcctagaatcagtgccagatgatatatggtcgcagcttccatgctcccaggcacattattgattgccatcggaagtcgactgcatggccctggcaacaactaggttcgagaggatgcgggagcatgtcaaagttatctctcgatacaattataagcaagcaatttacgccattcgaagagacactactttaactacgggcatagcaatatatacaagatacaacgaaactatcttctggcctatcattcttaagtacgccgcgctgatcgacctagcaacgctactacccgccaagggcccagctaatagattcactatagcggaaaaagctgctacaaagaaattcatggaggacagtgggtatagctttgggtatagaaaaccagcgacagtaccactttttctagaaaaacatatacaatatgcgtaaggctggcgtttacaaaattgtcttctagacataagcacttgacgtgcatatctaacgctatgaccatctaggcgcagaggtcacctgactcaacggtaaggatgagacataagccgtgttactatcccacccacgactctatagttctcagctattatatattcccttacagtgctgtattaaatacatacgaccatagggtgtggaaaatagggcttcccgtccgctcagccgtactcaagccacacgccggtgagttagtagttgggtgggtgaccaccagcgaatcctcactgttgtatgtttttttcttttttgctccaaatttggactgtagtagccggtagtaaggaatgtgtacggtagaagtcctcaaaactgtgagtaggtgttttatcagacccagtgtcgagtaaccagctgttgaatctgtccgaggggtgagctgccgctgtgatggccatgtaactctctccctcacttcgcagcgcgatggagtaattccagacatgggggctgctggtccaatgggtgggtggcacctctgccaggtaggaacaggctttggctttatgaggtccgaaaccgcagtaggcgcacattccactttcgtccttttgtggcgcgtccttcttttcttttacatattcatgaatgtccttgccgggaggaggttggttccgtagggttctctttttcctaggctcgttggatgtgttcgactcgtctttcgaaggttttgttatcttgagtcgaggaggtatcactgttacctccttttccacctctcctgcctcctcttcctccacgtcctcctccgcgattgtttccccgtcctcgtgaggattaggccgcattgatagttccttctctgtcatggaatggcctatgtgtcgggtagaaattgccgcaagatcagagattgtacgaacgtgggcagcatgaacttcattcatagagtacggagtagtctcattctggagatattcacatgatacgtgtgggatactgtcagtatcgaacccgacaccatcaaccctcttgagtgtatcaccgagtcattatttgatttatcatattgcagtgatgtctccaggcttttcaattgaatcgtttgtagtcaacaacctcctaaacaacgactgcggaagagttgaagacagtatctctgttaaagatcatgtagttcgacatgtaccttgcgagtccttgacgtcctttctaggtggctaattcttcgagtctcctccccacatcatcacctgcacagcttgagctctttgtaaacccaagaatatcatctacagcaagatgaacttgctcgagcagtctatcaccgctaaatacaagttctagtcagccctgcgtacctcgacttaagtaattaccattggggaactcacgatctcgcttcccggtcgtggaaaacattcctccaatgagcatacatccatacaatgggcaaatatgaagcgcaagttgccccatgggtgatgttcagcagtctttcggtcgtttgcattgacttggttgacagtgcactgtgccgtcccaatgaaaaactcgcgggtagaatggataatcggaccgatggggatgttcatgtattctagcgtacgaggtggctttcatagtatgtgattctttttctgggtctatgagctggtaggacttcatctggcttcttgggtgaaacttgtgatatttgacaggtgcgtagggttgatgcagtccttcgagaatgttatcggcatgtctgttgatccgtaatgtaacctcgtatccgcgtgagttttggtcatcttgtacctggtgtaacgcgttgtcgttgatggtcacagcctagtcgattagaactgctagacagagccgtaaagctatatccccatgaagcctaccgaagccaaattcagctgtagattgggttgggagtttaggattctgtgcctaatgatggtgttgtggcacagccgaaggagggaactggaaacaccctgaggacgcagtgttatccaaaaggccttggtctggcggttagttttcatggtgaagacagttcgtatttcaaggtgtttcatcaactcacttttgagattctgctagtagaataattttctgtctataatatatagaaatatagaaatatgtcacatattcagatcccttatgagaacccgacaagaaagttaagagggaaggacgattaattctctacagacaaacagaagctacttaaatagctagtggaagcccgacaaatcaggcatcaggtagatgcgctcttaaacacaaacaattgtctatgaggtcactgggtagacacctaatataacgcttttcggatgactttggctctaatgaaaccaatatatcgatagtccgactaaagacacttaactcaatacttggaagtaacacaattcaaaagaccaaagaggcttattttcaattatcaagcaacggagccacctctaaccagaagtaatgtcttatgtgaatgagaaaaaggcaacctccactaaacacaaactccagcgcaaaataagcgagcaaatggacaagtgatgctaaataaccaccttgaaagaaaaaaggcgtcacgaaggcaaataaacgaaagtcgtggacctcataaacttcagcccgcaaaaacctgtctgtacctatggtctcgctcgaacgcatgcgagtcatctgcgaagctcgaaccctaacctatcttcatcattcggagaacagagtaataggctccggacagaccgacacactcgcgtcggggaatcggttcttcagcgtgaccatcagggccggcttatcccacaggaaataggctttctggtcagcccagttggtactctctgggcgcagggtgatatcgaagtggtagaggagcttgcagagaatgagtcggatttcgcagtttgctagactattccaagtgagaacacgttagtattgagtgaaatggtgcaatgcgtatacatggaagaaacgcactgttttccaaggcagacgcgtggaccgagactgaatggctgcaggacatctttcttatcgtccgcaaagatcgggtcagatcccagccaacgctctggcatgaacttatccgggaaggcgaagttggactcggagtggtaggaggcgtagtggtggcatgccacggctgtctgatcgggattagtacgcaggctccaaccgtaaaaaagtgaattgaagcctatacatacatcttcagggaggaaatggccgttcacgactgctccgccttgcggtacaatgcgcgacagacttgtcacgaagggcggatagatacgcagcgactcctcgataacagcagtcatgtacttcagttcttccacggcgcggaaggtcatataactgtcctgtttgaaagtcgagcggacctcggcgacgagttggctcatgacgtgtggagctgtacacaggtaaaagatacagccggatagtagggttgcggatgtctcgctacctgccacgatgagactggtattgggtagcgttagcacaatataaacagaagagaagaaagatgaaagcattcgacaatgaaaacactcacataaaaccattagaatgaatctcagcccgagtcataatacgctcgctgtcacgatactggcccttcttctcgctaagtccatgctggagaatagcagacataaaatccggacgggctatattcgactccaagcgccggtcgaccttgcgcgcactcagatcaaagtgttcctggccgacgcgcttgacttcccgcggaatgaataaatccaggaagcccttgagcatggggaactggttggcagctccaataaaagcaatagccttcatggagctgaagatcaacttaatccacgggtgaagctggctgtccttcaggcagtcgaaggactcgccgaacatcaggtcaccggtgatatcaaaagtggtaaagttcatccaacttttgatatcaacgatggacgccccttgccgaatctgtgaccgcagtttggtgatcaaggtatcgacatagcctgtgataagaccttcttgatctctcaatgccttctcagagaaggcgtgggctagcagccgtttctgtcttgcgtgggtcgcattatccaccgcacagaccaaatgatcgaccccattcgccggggctacatattggctccgattcttagggaaacaaccgccaggtctggcaccgtagatatcgcgaaaggcctgtgctgtgttgaaggccaattcattgggtccaatgcgcagaattggaccgtactgcttgtgcagcgccagaatatctaggtgattacggccacggagaatggagacatttgatgggatgcgagatatcgcccatagctttggaccggggaagtggcgcaggggcgaccagcaaaaagtgtagatgatgctgtaggtgacccagagcaggagctgttcggtgctgattagcgttggtttctctgaaaacgcctgtagagggcattgctcaaagctgttgtgtttccccggggagatgtagggattcttttcttgcatgaaacaaacgagggttgggagtacgagttgatgcaacttaccaggcatcctgcagccgcgccccaaaagccagggcctgaggttgcccaagacataagatttgaggtgaaagaggtgatagagatccacagggtcatgcactgccctgaaaccatattcagttcagggtcatctggtttgttttctggatagaagtgggatttggtaaatgtttctcctttttttcatgatttcaaatagtcattgggcactgaaccaaggccaaagaaaaagagaaacgaacaaagaaaggcagagttgcaccagtcgaatgcggttagtgcaagatgcaaaggtgaaagatcacatcgggagttggtgaaagaacccggattcccagccatatcaaacctatctacactcttgtttggactccgaaaatcatcgggaaccctagtcaaattgcagattcgactgggaccaacacggcttccgaccgtaaacgacatgcaatttgcagtacgtatgcaccgcgggattcttgagatctttgcgcacccccgctaggaaaacctgggtatcattattcgaccatcccagtacacgagtgaaaagagccaacgagtaggattccaccgccatgagaagggagcattggttgtaccgaccaatctccttttgcacagggtccctagcccaaacactcgatggaacctagaaaaaaagacagtcagtcgcgataaaacaggcaaacaaaaatcaaaagccaatcagacaaacgagcgggggatggtcgcaccttgtacacctcatctcgaacatcttcaaaaccagcctcaaccagccgctgtcggtgaccttcggcgatattcataggtcggtgaaatgcctcgctggcctgagttagtcgttcaagaaactcacacaacgccggcgcaagacggatcgaatcatcgtccgacttgagcatgacttcaaactcctgcaactcaacccatccaccaggacgcagatgctcgtagctctggcgcatcaaccgtggccagtcggcaatagcaccgcctaaatcccgggcatggatgaagtcaaatggccgacttgggctgtacagccattgcgactcggcatcgtccaccacaaatcggaggtttggtgggacccatgatggctggatgggacttagatcggtgcctgttatctcggcactggggaagctgtctgcgaagtcgatggcccagattccggtgccggtgccaatatccagagcgcgttgaatattactatccagtggtgctcggaagagccggccatttagtacgaggttccgtacgtggtgaaggagatcttgtcgatcttgttctggttcgtcatttggaaggacgtagtggccttcgcggtatgagtgataccgtcttccattctcataagcgtagtttttcacatcggatagcagtgaggctgtatagctggatgtgttgtctgattctccatcaaagactgagtctgaatccccatttgttgatgctgcagatgatgtgtctccattgtcatcattatcgtctggcgataaggagtttacgggtagagatggcgcggaaccactgtaatccacttcagaaatggacacggttgttgcgctcattggagccggcggcaaagaatgcggtgttggcagatcccacgttgagctcaactaatcaatttcagtggctgatgtagttaatccaggcaagggagtcaggtactcctcgtcactgtcctcggaactttcctccggaattcgtgccagtccaggagacgggagaatcccttcttcgcgatgattgatatcggcctcaagcgcagagtcgtccaacaatggcagctcaggtatatccggcaagccagatgcacgaattaccggcgctcgaattgaaggagcaggcgacaatcgcctgactgaagcttcctccattgcagactccatttgatcaaaagtccgttttaacgggatgcaagggacaggtagtagcccagcctccggagctggaattcctgatatcattttagtggaattcggcacggcgtcagacgacacgattagcgaggaatcacgattccctgtcaaggctaggtacgtgtgagaggacaatagatcggtacccagatcaattctcgtgttgcgtcgccggtcgtccaagcacatggggtaaatacaaaggaaatcaatcatgtcaagaggaggtagccctgggccaatctatacagtaaagatatctgaccacagtaagcaatggaatacttagaagatcattggggagaagggatcagataaatagcaagtttattttagcaaagagcttcacttttcatgagattgtctcctttcccatggtatcacaaggaatatcaaaagggaaagtgccggagtatatggccaattctaatatcggcaggggtttacatagtacgacaatcacactacggcaatcgggcttattacctgcagaaaactatggccaaggtgtagatcctgaagaaacccgggattttgtattgatataactagactcatctcgccccagtctcgagtacaacggtttgttcaccactgttcgtgcatgagtttattcggtgggatcctgatgccccaacacagagaagaagcacatattcaggaatttcgtattttgatatacaaaaatcatgacatagaagacgtatgccaacattcaataccagttcacgcgtgctgattcagctttggggaccgggcatgtaacagtcctggctcgaattcttggaaattgataagattcaatgtggtatacattcaatcaataaccaagctaggccgcgatgcgtgtgggatattgatggcatttttgaggggtggattcatgcacagagtttcgagatggtacccacgtcccacacatcgccggtcaacctctatcgtttcagcaggattgaagctcatgtttccgggtcccatcgatgaaagcatcgcatggcgataaggacaacagttgtcaacatgagtgacagtttataagacaatgccatggctttagatgagcgactcgcttggaaggtgcagccgaatgcctgcttcatctggggttggcaatctcattggacaacttcgcttgttgatgatgagtatatatatatatggcatctcgatggcacgaatgatggatgatggagagaaaaaggttgatatcatatgaaaaatgactatttgtaggccaaagagacaatcagagacaaagaacgagcccttctttattggaaggcgttagaaaaggcggcaatatatccatgcagcaggccgaacgaaccctagtcgatttttaaatatttctccgaatgtgtttgcctctgtggacattctatatattttaagatgcctttctagtataagtgccctgtctatttctcatcgaagcgtagcactgcccaggtcattgcgttgcacaggtcggcggaattgatatcctgtcgagggttggacaaggtgagaataagatctttcagctacggtgccccattgaaagagcgcgttgatgcgatgtttcatgttgtatatggggtttactattattggttgtgtaaaagtagacaaccacgtacgcggaggatacctcactgagtgttgaattgatttctgtaagccactgtaggatacagtatctgcattgcagttgcaattgcagctgcagtatcggggtattatctcattcatcatcattcatgcgcccggatcgcctggagtggagggccggtcctctctccatctattagtccctgggttttacggaaaccgtcctccatgtccttgttcagatgcatctgcttcgtcaggtttgacctctagtcctgctcgaataaaagcggcatgcagaatccgccaatgggcctcctggttgaattcgcgtaggctctccagagtgttacgctgcacctctgcccgtagatcgatctggttcgacaccaacaaccccttctcaaggtcgatgcgagcgttcagaatgccaccttgaatgaggccgattagttcttggacaaacggcgacgaaatatccgtcggacgcgcttcgccgccaacgaccgtaggggcaaagatcttcgccatggaatcgagtgtgacacgactgaaaggaatcatgtactgctcgatggatttggtgcgaatgcgtttgtacaattgagggatgtgacgctgaaggtgaatgtcgagtaagtagtcagggcgataagcttcgagaatgtcaaggcattggcggaacttgaagttgcagaagaaaacgatggcgcggcggatatgaggctcgagctcgaggaaggtgcggaaagtctggttgtcaagcacatttttctgcagatcgtcgcggttcatagaggcgagagcacatagaccaccgtagacggcgacatcgttgggggtgatgacttcattgtaggtgtcgcccaggtccggcgggatggacaggaaagagtttgctgcatcgaggtacaaggtttggtgcatctgtgacagagcagaggcggctgtgattttcgaaatgtttttggctgcgtcatctggctttgactgagagttgcgtagccggtgcacatttgactgtacagacatccagtcaccgcgttcagtagcgacgtttaccatcttgaagagcatagaagtaatgtggttcggagtagtgcagtagtctctcatgcgagagtaagctttggaggcagcagctagatcaccagtcttgtaatgatggttgcccaaatcctcatggcccatctgtagaggtaagtgtcacgcatcttccaaggatatttgtcattacttacgcggatgctttctttaatcaaattatttttgtatccccgtagctcatgttccagacgctcagtctgagtctgtacgtatcgattggtttcctggacccaggcggcgtcaagagaagcatcagggtcgctcggagctacctccgccagtgcgcggaccgccttctcatatctcgaaacgtctttgttgattttagcttcgtcgatggcacccttgagggcgtcgatcgagagcaatggggagcaaatgccgatgaggtaaagacggtcatagcgggtacgccctggtcgtgcattagaatcagaagtcgtttagagacaaaagtgtcactcaccagcgtagtttgcaatgtaagtatcaaggtcgaatttcgggggctctagcaaatcaagtaagtgtgtgttcccggcgtagcaacatcatcgcgcggagatagccccgcgtggggttaacataccttctaccttcactagtgcctttggtcggggtacagtgatagtcgtagcctccagagctgtggcatccatatctgcccgagacggaccagatgcgtctggaagcgtggtgtccatctttgccgagctgtttagacgatgcgttgcggggagaggtgacactggcaaatcgaagaaatggagcttgattagcaagctagggtttcagtggaataagatagcgaccaatttgaacgctaagaacaatatgctgttaagggaagtgaatgagaggtgggtgacagccagtcggtcgatcatctgtgatgggtgattgattgtctggcaaaacccgaccgcctacaacaccgccatacagaagggccgtgaagatgtacatcaatacggagtagagatagggcaaaaaagaaactgtcattctctcagagtatcctatattttggcctgatatatcttcttatatgacccaaatagagctaaaaggccaaaagacaagctagaaagctagaatgtcactcaaatcgtaacaatggggtagcttggttgcagcgatacgcgaccggaagactctgttgatcaccacgaagcatataatggaaatgctgaacactgaagactatatattaatccccgggcttatatgaagacgtctgaggcactagaaatcctcgaaagccgtagagtggagctgcactatgaacctcggaacgtgagtaatcacgaaattaaacatcaagtaacctatcggctatataaaagcggctcgggaccccaatatcttgattataatccttcttgccgacagcataaacagatatataatcgacaaagctcggcattcagtaatcacaaacaaagtatataacaagcctaatccaagacgtcaatcgaccccgactcaacttctagcaacagaacgaaactcctaaagcctcaaaatgtcccaaacacagcaagtcaccctgataataggagcatcacgcgggatcggacgccaaattgccatcgacctagcaaagaacggctacgccggtacagccacatgcaatcccacatagaccatcgagactaaccccaaaccccagtaatgctatccgcaaaaacaacatcggacgcatcgacagtgactccgttcccaccagacccgaactcatcgcagtctaccatcaacacagtagagcgcgagattcacgaagcgggcggacacgcggcaacagtcgccgttgacgtgcgtgacgccgcacagatccagcatgctgtcgacgagacggtgcgcgtctttgggaagctcgatgtactcgtgtacaactccggcgcgatctggtggtcttctgtggagaagacgcctctgaagcggtttaagcttatgcagcaggtcaaccccgagggactgtatgcgagtgttcaagctgctttgcctttctttgagaaggggggctggaaggggcgcattattgttgtatcgccgcctatttactcgaggttctttagggggaagactgcttatgcgatgggtgagttacccttgatacgtggggtagaggatccacatagagtgtgtgctgatgatgtgttgtatgtaggcaaagtcgcaatgagtgtcttggtcaaaggactggccatggactttgtacgccaaggccgaaatgaaatggcggtgacgagtatctggcctgcatcggtatgtgtcttggtcttgattccatccggacgtggagtgcatgaggggattgctgactgcatcattacttcctagtcgattgaatcagcagctacagagtataataagggatccgacacatcctacaaaaaggatttgagaaaaccggtatgtccatttcgatactgtctactcttcctggtcaattcaatactgacacgatgcaatagacgatattctcagatgctgttctggctatgcttcgtgccccacatcaaacagtgaatgggctcctggatacagatgaggactttctcagggagaaatgcggagtctctgacttttccaaatactctgtaatcccaggatcgacgccacggcggatcatgccggccaagttcccagtcttggagattgcagagcaagacgatgaagggcagcgaatggatagcacgaagttacgggccaagatataggtttgtggaggggtgaattgaacctctcattcagactagacgtgcatttgatacagtatctgaaaactggagatgtaaataacccatgtatacattaatagggttaaataatattatatcgcaagatacataccaatgtaggaaatgttaaaacagggtgtaatgagcgaacggccagcaatagagtactccataaacccagacaagaaagaaaagaaaaaagaaacagacgcccattgctaatgcagccagaaaatgcaagcccagaaagaaacaaaagactagccaatatcatggaagcctcgagcacgaataacggaaactccagggttcaatgcccttggcgagccaatcagacatagacccttgactctacaagagaacagcaaagccagcaacaaacccaccaaccagaacacaaagcccatagacatggctgatatcaacagagaccatgcgcggagcagcaccagtagcgctggtatctccattgccattgaccagggtattgacaggggtctcggacgcagtagcagtagcagtgttggcggtagtagtagtagtagtcacattgatacgcttgggattctgggctccacaagggttatctactctgcagttattctggcaagtggtgttaccgtcgcagttgagaacgcattggctgttggtttccgtgcagatgtagtaggggattgtcagggaatattcagtggcgttagggctgacgccgttgctgcatgtgcagtcgtaggctagtgtttcctgatgattggagttagttgggacttttctttccgttaagatgcttgctaagcgaagggcttacggcggagcagttatttgttgttggtgaacccgaggctcctcgtagttgtagacagaggagtggacatgtggatgtctgggagttacaccaggcctctaagggaagggagacgtgttagtatgatgttcatatgtatagtggagagaatatatgatatcaacttacgtcttgtagcaagggtaaccgatgtcgggtcaaattggctgttgaccagagtgacagccgaagcgaggatgaacaggctcttgggcagcatggtgtcggttgagcttgagaactgaggagatcagaaattggcagcaggcagctacttgatgctcgtgttagactttttttcttcaagaatgccagtgatagtctgacacatgccctagagccgaaatagagccggcgatagctatctcgggcagatggaatgaagggggaaaggtgtaatgggtctaggaaatgtcatggaacctacagtatgaatttcttgaatctttcaagaacaagctgagaatgaggaggatgaagatgttgatgatctaaagccaatagcaagaggctgctccttgaagttgtaaagatttaggggtgcaagtagctcaaggaggaaaaaaaagtagccagcaagggaggagtggggaggtcataaatgaaaagagcaatcacaggactataacagcctatgtatagaattgtgctagctggtctgcatggtggcatgcactagtgcactctcgcggttctacggcatcgaatggtaattttttccttttttttttcagcaagcccaagatatttcctgtcaagtgagttcagtagtagacccgttgcttcggaagtgaggtgtggatttggacgaagggtccgctataggggtttacccttgcgatgtgtcgatccggggatatctccatgaagctcgggtagagacgtttgtccaggccgggtgggagctcactgtgtgtcacatctgtcatcctgtcgatagtctccactaaaaacacatcattgtaggttctcaaagataggaaagtgacatgtctcagttggagttgagaaactggaaagattagaggacgccgatcaagaaacgcttaccgcattgggattggcgtggtttgtggcttgaagtagtcggatgagattgtgaaagtgtcaagttgaagtcgaaaggcaggcaagtttgaaattgttgtcatatatgagattgatcttagagaaatacaatcaaaactgtcaattatcaacgtcatcaaagggaattgggtacaaagcatgaacatatccatatctgcccagccttagctaatccacccgaaccagcccccgtgaccgccaatgtctcaaatcgactccaattgaatttcgttatcgacacactcaacactctcactctctcgccaccatcgacggttccaaggttagtttgtctcacctctgatcgcttgtgccaccccgagtctggcccatccctgcatcaactccaatgtctaaaatagcccgattcataccaccttatacttgccaccccgcatgatggggggaagaccgccggtccatccccgaaccgagccacatgcacccaaacgcatcgaacctacccaacggcattgaacctcaacactcaacagaaaagctaacgaataccctcctaccgaacaggccaatacctacatattccttacagcatctaatggatggagccagcacccgaggaggccaatccggcatctaagccgccctccccacacccagacatccagcccgaccccgcactccgacctgagaccgagaccgataccgataatgccaatgatgatcctacaaaaaccgacagccacgatgatcaatcccagagctccccatcctccacctcccgccccctctccgccgtagtgcccccctactggcgccgacacgagcgcgatgcctcacatgtctcgcaggcgtcgctgcgtggcgctaccatcacattagaagaccatactaccgacccgaactcggagacgagtcgggggctctgggcgagtagcgttactattgacgatcatgttgtggtgcgcggtatgactggggtggggtcgtatgttgtgtggaattgtacaattcagacactggatgtgagtttgggatcagataagggaacgtgattggcatggctttctaatcggttgtttctgtatagggtggtccaattgttgtccggatgaggtgtgttacttctccgtcccggtttgaaaggatgttcagctgacacttgggctctatagatactccgagttcgatgacctgcgccagcggctggtggcttctttcccgcatgcgaggagtgcattgcctgcattgccgccgaagagcattatctgtacgtcccttgctcctcttaagattgccattcaatcagctaataacccttatcataaagtcaaattccgaccctcattcctggaatcaagacgcgtgggcttggagtatttcctcaagtcagtatctcatcctatccacatgattcattgtgtagacctatttctcacaccgttccagctgcgtccttttaaacccagagttctcgggctcccctatcgtcaaagacttcctcttcggtcgtatatgttaataatcatctcgtcttcactgggtggtgctggataggttatatggctgggcgtttaggaattgcattttgcattttgcattgtacatctctatatttcgggctgatactaggaacctaagcccacaatactggatatgcgactgttacctttgcttacagaagggaacaacttacataaccatggcaaatactagatcagacgaagcggtctaatacatagaaagtagaaagggccatagaaatcgacaaggatttttcaagagaaccgaacaatgccgccgctaaggtacaaagatcccagcaagaaccctaggcgcaagcaattggaatagaacgccttgagtatgatgtagtgcccagcatcgctgaaatagcaacaaagaaaagaaagatatttaacgcacacagggcgaatagaatagaagaacctcctcctcaaaagtcttgcctttatgggcatgttgagcagaatcatccttcttaccatcacccttcaacttgtgactcgccacaaaagcctcgacatccgcccggaaaatcttgcgcacacttatattagccatatggatcatggcgagcccgtgtcggggaccgggtacgccgcgtgggaaagcaatataaagatccgagtcctgggtcgggtccgggcggaatttgtcatggtatgcctttttgccgctgatgggcagacggtggaacgcatggtcgtacaagccgcgtgtgatcttcttacaggcccacggcatgcccccgatatcctcggcggtgagtgtttggagcggttcgacgccgagaccgaggtatgagatgccggcgcgtcggaggagcgccattgacatgatgagaagaaggtcgctgattccattcacgcttcctggggctgcgatgcacggatcgacatggtagccgcccgaggcgagccgtcgaagagcggcgaaaccattgattgttccgtctggggtgcgggtgtagaggaatgtcatcagggcgggaacagcaaaggggtcgtatacggttatgaaggcttgcgggatagcagatgcgttgcgctcggcgcgccaggtgtcgtatatggtgattaggttgttttgtagttcctggtttatgccgtgcacggcgggggcgtacacgcctatggtgatgccgcctttgtttttgtttgtgagctgacgactcttggtcaagatgcgtttcccgctcttctcgagaatcacttcgtttgtctgggggttgagtacgcgctctgtggcgaagtggatggttgtccagccgtttggtttggcgtgatctttgagaaaggactcgctaacgcccatgaatgctatgctcaagtgatgtcgccgtctgtaggctgcaaattcggacaagacctctggtatttcgtctttgttgcataaaggatctccgccgatgattgccaccccgttctggaccttaaatgacaatgctgctgtccttgttttgttcacgaagaatcggtagctgtggtcgaggattcccatgtgtgccactctgccatgtattgcagctatttgttggatcgccgttgttgttttgaagtcgtcgagtgtgaaaacggtatcttgatctcggcattgcgctttcgcatgaaaggaatcagtatcgactttagttggttctgggcgagtagctgggatgcgttcattactatccacactcgtcgccggggtggaatcggatgtcgtatggcaacttgccgaactgcaagaggaagagaccgcgggacttgcgacgatattcttgcgcaagtgatccataagggaaattgacgagataccactgtcatcactgctgggtttggatgtctcaaagagctggtcaattaaggagtctcccatctcatccacgaacaaggtcttcggttttcctgcgacggggttcggagtgtttccctttcgtgcgcggcgtgatcgcatcttcttggttgtgggtacctcatgcgatgccgcagcttccgacatggtgagtgggacgcggaggcgctcggagggaataaaagagcaaaatatatgagaagtcagaaaagaaaacagcaagaaaaaatcaacatgaagtcggagaattgtcgggaaggcaaaaatggcgagtatgaaagtgctcttgcccgaagctacgtcggtatattaggcagaggcattttcataggcagttcccttcgtgcccatccagtgttaccgcactgcgtacccaggggtatagatcggtctcaccaatcagtagacggcaacggggctagatcgaccgctaccagccttatgagctcttggctcgtcctatgacgttgggaacagcagaataaagtgtgaagcgaactatatatagtctgggttctacagatctcttggctattacaacatgaccatgacgaaccttggaatagaggtacttatctctcacctctcatatacctttgtctaatttgtgttggagttcaattgtgccatgagaaccagccatctgtcagtatcagcatctaacctaagtatggttagcgatcaaatatacaaactggaagctagctaggtgtgcttaggttccaaagctgaattatggagaatatgcaatgaaaaaccacatgaacaaacgcaaaagactggatatcgtcaagttcaaatgggggtacatgaaggcgcaatgcaacgcaacgcaacgtatgtcttgatcgaaaggaaacaagcattcaatgtccaagcagaaaagatcatctcagcatgacaaaactggccagcgaaagactgaagggggaaaagagacgactactcatccgcagtaccgtgtccatccatgtgtccattcactgcactgcatccattggcaatgtcatcaccatcactctcttgttcaatactggaatcactgaattcaaaaagcccactgatctcagtggaagaatcatcactgtcacaccccctagccatccgtctcagacacgccaaaagttccttctgctgcttcaagatgttatcggccaaacggacgatcctgtcagtctgctcaatgcaataccgcatttcttcggtctgacgctcggtgcgaacacctagcatcgaatcctaaatctctttattaggataacagtatccagaggaccagttcggtacgttcggtactgacaatgtggtcgatccagacttgccctaggatggggtctggagtctccggcaggtaaggcgagtggagattcacagtacgggacacaatgcagtcgcgatggtggtaggcagaggagctgcttccttgtccattgcctgatgcggaggcagaggcatggggacgggccggttggatgatctcacgggtgggtctgccagactccatagtagggctgttaaattgaatttcaaaatcttgaattgaaattatatttttaattttcatgaaatttaaaatataatttcaattgtttcacgctaaggcgctagtaatatattggtaatgttttgtaatataagcagaaaaaaaaggcagaaaaactagcagtaaatttttagttactagtaaattggatgcacaaatttaaggtccctactataagtactcaaaatttcaaagggttaaaatacagttaagaggtagttatggtgcgtacaaaatatggccgaattaggttagtgtcattcttcccgtagccctaaacctcaaagatataccttaactttaaccacgaatttcagacgctacactagctggatacgaaagataagatatggtctagaatgcttaagaaaagggctttctagtgatactaaaataataataaataatcattattttatatgtacttaggctctatgatttcctatatagaatataatttcaattgtttcacgccaaggcgctagtaatatattggtaatgttttgtaatataagcagaaaaaaaaggtagaaaaactagtagtaaatttttagttacacaagtcataaggacgctttacacttattataatacacctacccctatcagtagactcagagtcagaaagctcatttcctagactaaggctttcagtctaaggcttaagagaagtcatatcctagaagaagcgatttctgataatctgctccttatcaaaccggtctatctaatcctacgccttttctaggtcaggctattggataggccctttacttataagtcgatagtttatctagagatagattagcttattaaccttcttaggtaaaagagaatgcgattatatacctagtgatttcgaggcaatagcgtcgactgcgtttcgcgcttaagcctggctgtagaggtgaccataccttagtaggctggttctataactgacttaaaggtattgctagctgtaatacccgctttaggtaacgatagggaaggaaattctaccgcgtatactaccctatagattattcagaggctggtccttacgcgtagtaatacagtccctttataaacccgccaaactattaagatagtaagagtaacgaccagagtaataataataataatagtccctatagtcctaccggtagtaccgatggtagtaagggaagtggtactggcggtagtagggctggcgatagtggtattggcgatggtggtactagcgatagtggtactggcgatagtggtacttagagcgactctttgactgtaagtcttctatagatatagggtaggataattagatgtcgtcggtatatagttcggccttgtataagagtgcctgaagtaggacggggtggccggatataggggctacagggagcattttcttacctagattaccagagatatatttttgacctatacattgcactctacgtggtctagcggactagcgctacataagcgtaggcggtctaagaagaatactaggcggtgtaggtaagagcctgtattcggagtgcctgaagcaggacggggtggccggatataggggctatagggagcattttcttacctagattaccagagatatatttttgacctatacattgcactctacgtggtctagcggactagcgctatataagcgtaggcggtctaagaagaatactaggcggtgtaggtaagagcctgtattcggcctaattaggcttagagtaagctatgataatcttattggctctctgaaaaattaaggtatctaattggtggactactaagagtgggtccatgcctgaggcatagaccgattttgaaatgaaataatattttagcgttgaaattgaaattgaaatgatatttttaaatttcaagtgattttaacagccctactccatagtgggccgctcggtggaggcggtaacgggatcggcggcagccgcggcggcagcgagggtctccagagcagtgaagcgagagcgtctaggctcaattcctttgtagctcttccgattactgccgtcaggcccaacagtagcaagcttaacagtcataatatgaacggctgaagcaaatcacgggttgaaaaatgagcgatgaataagaatgggcaaaagagcgaaacccagtgaccggatcagatgagacaagcgttgtgggatgaggaagactgaagggacatgtttcgatggcactaccctttccccggtgttgacaagagtaaatgagtccccatcgctgtcgcaagacaatgttctccctctttcattttctatactcctgattggtgggtcaccatgtgcactagtccaagaacagctagcgcatatatccacacgctactcccatttaggaaattgacatcccgcgatctcgacaacatgtctgaccactcacgcttgtccagtcccttctgtcgaacattcccccctgactgtctatatctctgtacttctacaataaaacacaatgatcacaaatcgcccggctaccccagctgatatcccccaagtgcgggatatcaatcactggtacatcgttaacagctgttccacttttgcaactaccccaccgccgatatcccattatgaggacatccttcgggacctgtccagaagaaacctccccttttatgtcgtcgtgtctgacacgcggaagggaccagacggcgcagatttagtccttggctacgcttacttgtctccattccgtggccatttgctgtcctatgcaccgaccgtggagctgtcgatcttcatgcgctatgaccagcggcaatttggctatgggactattattcttagaaagcttctgcgcttagtgcagcagggggaaattgagcaccgctgcgaggagagagtgggcgatctgccgcggattgggtttggtacctccatggctgtcatgaagacttcccttgtgcagaatatcattgcaatcatagcttatgacacggaggctccgtttgacggggaggtattgcggagatggtacatgaaatgggggtttgtcgagagggggcaattggagaacgttgggcgaaagatgggtcattggtgagttgcttttatctgcttggactgatggattttccagctgatgactttgactaggattgatactctctatcttcaatggtcaatgccagaaacagatagttattgatttggaatcagcgaagtatccgagtcaatggataagcaaaacaggttggacagagatgggagtgtatattcatagtcaaggcctagatagtcaatctgctcagatattataattagatggtctatgattggcgtagtttctccatatcaccgcaaggcaaatataaagatagggactacgaccgattctctactcgatgatggctcagcatgcaaagcttggggaagatagatgtgatgtatttctagctagcttggagccaccttgtagacagtgatatcaatgggatctgacttcggccaaagacaggaagccactcgcatacccactcttctccaggcaacaggctggtacctactgacaccccgagagcaactgtcgagataattattgaggtatctggcatggtgaaaaaaagaattcgaactcgatcacccactctggatgcccgaatatcttatccagcgttgccatattctgagccagatttggagcatccgcttgaacctgctagttggtgactctttgacttcgggacgtcgtaaccttcatccgtgtccgacctcctttcgaattctctatccaactccaggatttcatatggcttgtatcgggaagatgtaggtattcttgttgtataatgggaaggaacgtgtaggtgtaggttccccggcgcgcgcggcagcgtgagcgttgtccgcatccgcttccctgtgccggctacatcaaaaaagcaaaggtcagcatgttgttcctgatattctacacaacgatcaagtgacatacctctcggtgcagcttacagtggtcagccttctgcaagctggagctaatctgcaagttaaagtaagaagtcaataaaagcaaagtgagaagagagtgaatgcaaggtgataggacagtaaatacccaaagattgaagaggaaagaatgaaccctctgcaaggaggattggttgtccctgttcaaagtatgcaggatacctccaacgattctgtcaaactggcggtacatcatacgttcaggttcatcaggagattcaccaatctggaagttgatgtaatgggccaagtctggcatctcgcccttgagctcgtgaagtatcaacagggtaggaagccaacagtagctgacttccttgcagatactagcctgagcgcggcaagtggaaacaaaggcatggaacgaacgaaactggtaccatcgcatcgtccacagcttcatgaatgccctagactcggtgtcctctgcatcgggcaacaagttgatgatcgcaaggtaggcctcgtcagctagtcaaaggtggttattgctagattttatgagggcgacgaactcctcttccagactaagtatcagccatttgctcaaattctgcgaccatttcagccagttttcatatttgatgtggtcgagggtgggtcgtggaatatgctgatgtttgctgatgatatcaatgaggttgaggtctaaggacgagctggatactggttttccaggatttgagatccgatatctcggacaatttcttgacatttgtgttagtaatttcgtcaaatggtggcaggtcatcgattcctgggctcggattgagccaagatattccatggcgttggtaaccggagttgaggacataatagagagatatcataggacctgaaatgatggttgatacgggtgaaataaaatatacgcataataaaaagattgtttgagtgggaaattctgttgtgagaaacgtgaacgtgatgctttaaatcccacctcaggacgcactcgattactacatccaaacttcattattcatatttgccatcagcaatcactactgtctcgctggttccttcttccctggcccgttgtacagtcgcagaatacctctttccagcaatgagccaccaagcaagctcaatactcaagaatccgccgacaacaacacaggtatagttcatgtttgatactgcgtggctgttagcacatagcttgggcaggatacaaaggaatcatagaaaaccacagcacatacctgttacaggcatctgatacggaaatgagaaaaagacaatggcaaacaccagccacgccaaagagacgatgttcacggtcattcctagtgtctggcccatggagaatgggccacggcgcatggttcggcggaataagagaacattcgtcagaatgggtacaaggtaggcaaagttgttgatcgtcctgtatccatgtcagtgtcaagtcgttgctaactgctttgtagtatgaaaaacctacaccgcagagctcatcattgcattgaatgccgtgctcgaccccaagtatatacagccgaggagggcgataatcacggtaacacagagctgcgcattgaacggcgaacctagcttgggattgacacgggcccataccttcgacaaaggcaggccctcgtcacgggaaaaggcccagaagactcgtccggtacctatagaagtcagagggttgatcttcgatagcgaaagtactacttactcaattgtgaaccgatcacgcagggcccaagagcaatccataccatgaacaccagcccgaatgctccacctcttgtagaggttgcctgccagaagagctcggcaagaggaagtccagtatgtgtgttagccaagctgccataatcttgaactgagaacattagactgagcagatatgatagtccggtcacgaatgcgattgatagcgtgatagctgttgatgcatacagttagccaaattatcgaagaaagcaacacgaccactactaacctagacccaaaggggcattctttccgggctataaatgctggttagtacaatacatcagatttgtatctccgagccatctcaacttacattgggcatttcttctgtgatgtgctgtggtatggtcagctgcattcaaccgggcaccttaacaatgtgtacaactcaccgaaatgccatctagtcctccaagtgagtacattggattgaccaatccggtgataaagcagataacattgttgtcccagccggtgttgttgatccaggtgcgaaacacgaacttgctgtcattatgaactggggctttggcggccacgacaaccatggtaataaaccaggctaattgcaggtagaccactgaaactcattaattggtgaaccacacaggaaaagaacccacatacatgaaaatttgttgattgccggaataaatcgattcccaaacatcaccacacccgaagtcacgatattgaggatctgataagcgacaaaggtcatccacggttggaccaccaggtcatcatggtaaagagcaatcagcgccatggcggttgtggcataaatcaaattggttgatgcagacgtaaagatccctaggcttcatcagctcatgctaagacttttaatgctgggccacccacatccaaatacagtgcaccagccggtggcaaagctgagcaagctgttatatcgcttgggagcaatggcggcaatccaatgatacatccctccttcggtagggtatgctgatacaaattccgccagtgaagcaccgacaaaagattgaaggatgaaaacaaggatgaagccgtatatcactgcgcttggtcatttattgacttccatgcgatcggtacggaatgaaaactcacgggcgccaggaccacctgcgtcaatagcagtcatcaaacccaagccaaggcctattaccatgtgagtcggatgctgagcgattgcatgaaccaactaacctgtccatgaaatagtacaattcgccgcgagtccaatcaaactccaaagcgagaaatgtcgctccaactcctgcttatgccctgttcgccgtcaataccatatctcccaagcgccggattcgacacatacccatctgggccaaccgcagctcatcctcattctgcaccttgataaactcggtctctttcccatctccaatagacccgaccggcggagaggtagatataatttcagggccgctcataatggacataaaatcgaatatcgcccacggtaggaggtgagtatcacgaacagaaaaagagggggtacacatgaataataaataaaccctgcgcaacgactgacctaagtaccatcatgctactccgcgcgatgatctttagctcttatcacaacccggcaaacctgcagaaatcaccgggttcgccgacaagatagccggtcggcggcgacgtatcagcgggcgggattccgccaagccacatgcgtcccggcgatcgcggagcttcgccggtgcagaacgtggggaggactggaacccggaacccgctcgcgtgtctgcttcatgcacaggccgttgtaaccccatttgtgcttggcggagtataagcttgcgtcaaacttggtgtgctgtgcttatctcaatggaataattcggagaagattgcagtggatgtggaaggttgcgacggcgtaatcgacgatgagtcgtgtagcttacgagtgataacacacgatgaacgactgtaagttcatatggtcccacttggaggtcctgggtgatattgtattttgtatcaacggcattattcatcctgaccgacgacatccgaagatagtttcgcctactcatatgctattccgacaggtggaacttgatacctacgggtctaagtgcatatcgaggtagatatttgaatctacagcttctgttcgcacaagcagtaggtccttgacaattttcatatttaaattaacatcgctggtcaaattaccaggttttcacagtccgtccccttgtatacagtatcaagtatgtattttcattcgaaactcccaagttctcccgagaaaagttgcttcctaggaaacgatttggtttgccgaagttggacaagtctggcatctcttcctcgtgctcgtgaagcggccctctgaagaaacatggtcttgaagtcttccggagctcctgccggacggctggtttatcccaggctctttcttggtgagaaactggatatgcggaagatttccgatattaatgagatgacatgtttcatctagcagctccacaaattcttagttggattcttcgagtacttttgtaaatactcaagctttcgaagtatttcgtactggtcgatcaacagaacaccattctgaagaggggatgatgaatatgacggagtactctgtttgtttcgttaataggatccaggacagccgcatagaacgagatgtttggtcgtccgttggatgctgagtgtagttggtctggtccagtgcgaaccagtatagcctgccaaccagagagatactctgcgctgtctttatcatggcaggaaatctctgagtcctcgctctcatcattccatttccacgatcggatcggcttatgttgaagaaggaattagcgctccatattttgaagtacaaatcacacagcacatacatacatacaggatctgctgcgatatttcttgacctccacaaccaacagagaccatcaaagtggaagtgggaatcgcgctctcaatcctagcacttctcggaggatattgggatcacgtcacaggtctgccatatcttcctctctctcattctttttccctgtacacccagttagcatacagtccattatactgctcgttcttcttgtggtctcacatcgtatattgagagtatattgagatcaagattgtgataaatataatgaaacggaagtaagacacatctctaccatgatttgttaagtctccggatctctatcttccagcgctctgtgtcttttgagatatatattatatgacagattatttacagaagaagaaagtagccgacgaattttgtccatgacctggttaaatatagcaaacagcaaacagcaaacagcaatgggataatgtgtgacggattcagaacacaatggcatccccttagcatctttctcctgtcgcagtggatatcaccggagactgtcctattggcttaggagattatatttccccgtgggcatctcctaatttctcggagataaaaatccattcgcatgtactgattggcgacttctgcgacagacacaaaaatgaataatccttccaagcacgacaagaatagccaaaggataaactattgtgtgaaaattgaagctaactctccaactcaggggctattacatcattgagctctttagctttacgatcttgcgcacgaactcatcccgggagacctcaggatcgaccgatcgatccgatcgagcttgaaaattgattgtaaggttgtcgatcatttcccaactgctgggacattctggcactttgccctcatactattgggatctattcgctctcgtttcaccagaaccatggactgctggttcaaaagactgccgatcaccctcgtgggcgatcatggacgatatagtcataatcctacagatttttctttaaaagacctggaaggcctaagcacagatccgatctcgatttcgatcccttgaaatagtacagcatggaaccgccgtccatcccagataatcgtcctatcaagagacactccgacatgtcttctacgcctactattgttgagccggatagctttggcgcacatttcaaacccatgagctataattccccacgttcaggttctcggggacaaggttacgaaccgccagtgtttggccagccggctattggaagaccatctgttggaccgcaagagcgatcaactcctaacctcaatgccaatggtatctcgaatggcatctataatggcgaccagtttggtcgcaagctctccatcgatcaacaatcagtcgcagattcagtcaacacactagatttgggctaccacaacatcggccagcaaccacgaccacagcacgagatctcaggccaccaaccctttgaccagagatccctcagcactctctctctagaccaacagtccgtcggaacccaatcgctaggccaccattctataggtcggccaccaggcggctatgctccgtaaggccgaacagtcccaattgccagaattccgctaattacgcagatcatctacttcgcccgcccgcctccactcgtctgcatccaacaggtcgctacaaccgaacttgccgaccaacgaactcccagttcttcagcagataaatccaaacgagggctctgaggaattcgaccctatcgctgaagaaaatgaggaaacatcttttgatctggtcgccccatacgagggcgatgcggcccccatgcatactctagaacgacaagcggacctcatgttttgctcggaccatatgctagcgattctaagcactccgcgctacctcgcacgcttccgcgagttccttgcccaggagcgtccagggtcattttcaactctgaattactacctaaatgcttccaaggctctcaaagcaatcgagtatgctaattcgctcgtacgttcggttgttgatgtgcctacatccggtattaaaactgcagagcacctcgttggctcgactgtaaatgtggcgcttgaaaggcgcgtgcaggcagcgctggatgccttgactgccgaggaattacctgctttcattacctctacatgtatcaacattaccggcaaggtagttgaggagcatgtgcgcggaaccttgcctgagaaattccggggaacggcagatgcgctgggtgaggtattctgtctgaccgatccatcgcggccagataaccctattatctttgcttctgagggtatgtcggattactttacattgtctacacagaatagctaacgcactatgcagaattccaccgcactacacaatacggcatggactacgtcctaggaagaaactgtcgattcttgcaaggaccgaaaacgaatcccaacagtgttcggcgaattggagaagcgctcagggctgggcgacaccactctgagcttttcctgaattagtatgtgccccaacacatcctaccctgcaaaactaattcgaaaacagccgccgcgatggctcaccattcatgaacctcctccaaatggctccgctatgtgacagccgcggtaaaatccgctacttcatcggcgcacaggtcgacgtctccggactcgccatggaaggagcccaaatggaatccctccaaaacatgcgagcgcaaaaagaaacccccggggcagatggccaaataaccaaagaatcaaatagccagttccaagaactcggcgaactcttcagtccgcgcgagctgcggaacgtgcgcgagcatggcggaaccctcttccaaccggtcgtcaacgaagatcccaaccaccgtctattcctccaagactccgacaccgagaacgaggtcgaaacccaatcccaaggtccaccgagacccacatccgggccgacgcccagccggtccttggccggtgtctacaaaaacgtatgtcatccatccctccatactcggatatggtatcgaggactaacagaagtaaaccagtacctcctcgtccgcccatacccatccctccacatcctcttcacctccccctctcttcaaatcccaggcatgctccaatcctcattcctaaatcgcatcggcgagacaggcgcgaaacgcgataatatcatcaacgctatgatggctgggcgaggcgtcacagcacatatcaagtgggtgaccaaattcaacaacgaccaggctcgtcatcgctggatccattgtactcctttgctggcgagtaacggccaggtcggtgtctggatggtgattgttattgatgaagaggaagaggcagtcagatggaagggtaattggccgactactaattaaatagtcttgctatgtatatgtaaattattgtgatcactaaactatctcgtgtgtgttgtaatacgttagacttcatgtgtaccggataatgcctggcgctcgagacttttcccctttcattttagtgctcacctcttgccgctttttgctctcagagtaaaattgagcataggctgagcgtaagtatgagctacatcaataagatgcagcacgctagtcacatcacgtgcggctattatctagctcaccctccatacattacgacagcatcctcagcgataatgctggtgttgggtcctaggatactcacgaaaagattacttcttatctgactggcgctattatgcgcaagttggacggtaatactcttgtttcgcttttcttcggtgatatggaagtgcgtttgttgccgcacctatgggaaagcaccagatacatcgatggagaaccccgatttttgcgtaaatactgagccccttagcacgcaaggcctccctcctctcctcgaatgacgaccgggtgactgattttattcaccagccatggtttctgaccagaagatagacgcagggttagctgtggggagtgagatcctgccaacaatcgttgaaagtaaagaaaacgcaatatccagtctaacatggaaagctcgcttttaggacaacatcatcacagtaagcttccagttatggactgatcttttccctactctttggctcctgaaatttatactgtacggaaaatctacgtcagccagcattattaaatacctacgaaggtcagcagtctttgctttatgacatattcccagtttttcttgcttcttctcgcagaaacctgccggaccttgtcaatctcgtaaatttatatacccgaatccacgtttcatagaatccatcgcacctgctgcggcgccaccgtgatttcacgagagcatggacgatttatttctagccaaacatcccagcgccaatcagattctagtccaaacagctacggggtctttttacgttcttagtgctcaaagcttactatcggagatgctaccgcgcgcatactacgtctacgatgcaaccacagaccacaaccgccactcaaaaacaaaaggagcacacatttacactaataaaaaccctttaggcagcctgccactgaccaaaagactgtcctctcagtttctttcagagaagggagaaccggaattatcttctcggtatcgtccgcgctaggatttggttttacgccctaggggtttcctgtggaacagggtggccctttcgaaattctctttgggcacgtcctgtacaactacctagctggcgagcgatagctttaatcgaggatctattactatacagaattgatggtacgcggattccttgagattaacgttcctttggctagctatgtttggtagtcctcatttcactaggtacatcaaagctgtctcttcataaattacaatatcagaatagtgcacttggaaaagtgcctccgtggctttcatgttcaaacctggaccatgtttgcatattcatattcaagtggcgcgtggttatttccaatttggttgttcagtttcccactcattaagcaatcgcgatacttccttcaacgagacaggtttcgtaagaaataggtccactcctgagtctagcgccttgatctccgcatgggagctactaaggccagtaaaagcaattatttttgcccgaacgcacccatcccgtgctttttccatcgtgcgaatgatgcgcgttgcttcatttccgtccatgatgggcatggaaatatccatgaaaatgaggtcataccccttcgacatcctctcgacgcactctactgcttctctgccgttttgtgctatctccaaaagcgggacctttcgtttgttcataaaagtcgtcatcaggcggagattgatatcgttatcatctaccagcaagacccgaggtccgctctggctctcatttggcgtaccagtaggatttaggctggaagaattcgatagagtagacgacgtggtacgaccggatatttctgtccctgaaagtagcacgggattatcacgcctgacggagccaacatgtgagtgtaggtttggtgtgaaatccaatgactcagcagctggtttctctggatgaccaagtgacgaatgtgtggaagtctcggccattggaggcgggcgtgcaagcttgagtcgttccggaaaggcagattctgatccggcagtaggtagatgcgatctaggagacgccggtgtcgaattaagacagcccaagatacctcttgcgagtctttgtggaccgcaaggtcgacgtagaacgctaaaagccccagcaaggtgtgaccactttttcctagggtcactggagttgtcccattcattgcaaaagacgagcaaatttggtgatccagtaagtgattgccgtaccttttcgtcggacaagtaggtctcgttaacaaatacaaaatcaatatattcattggcagaccaaggcacgaccttgatgccataccaatccatcaaatactgagcgatcgaagaccagaactgatttccgataagggaggagtccattccccaaaaggcagcacaactcttcgttaaccccatacaagaaagttgtgtggacgggataggcgactttcctgcgcaatccacatcaattgatgatgaatattcttcctcggttagacgctcaagaggaatcgagacttggaccacagtgccttcgcctactcggctttgaaagtcgatacttccgtcaagtatatccacaatgccgcgaacaattgacagaccaaggccggtacccactgacagcgtatcctcctgcgaaaatggagtatataaacgagtccgtaggtattcgctcgaaatgcctttccctgtgtcggatatagtcaaggttaccatatcctcgggattctgacgccgcgaacgacctttcggacactgagtggcctccacgcaaattgaaaccaggcccttctcggtatacttgagagcattaccgagaaggttcatgatgaggcgccgcagcgatcctggctgaactttatatacccagtcgttgttggtaatattaatgacaatctcgatatctggactggaggtgacttcctcgtcctctcttaccagttgggtaggcaaactccgtgaaataagtttggaatgattggctagcgatgcagactgtttcatatgggaatgtcccaagcacacactatcaacaacgtcctctgtcaatgtggcaatattagtcgccacgaattgatccatgcgcgctgggttttgctcggtaaactttagctttgagaaatcctttcggcgcctggaccttctcttccgcctttccaatgacatgattttgctaaagtctagcacttggttcatcgtatccaatagtgttcgcccacatgcattgatagtctcgataagagattcctggaaatcatccagctgagtgtctcccaggaattcggttgcagccaagacaccatgcagggggctgcgaagctcgtgtctaagaaacagagtcagtaccagctgcattttagagagcaaatgatgactcacgagatgctacttatgaagtcccccttctggcggtctgcgatgaccgattcaacacggctgtattcggtcattatggacgatgcgaagccaaatattgaggtcaaatcaacagcccgactgaaaactcttgtcggttgaggtgtccaacagaagcatccagcaaaccactcagaattggtggcatcccataagggaacaaacatgacttggcacgcatcaggaaaatacgaattgagtttaaaggtttctgaggccttgtgcttgatccgttgtttctgagttgcggtagtggaatgctcttcgtccgaggtggataaagacccatctctgtgaaatgaccagagtcttcccttgggatagcgacgagttaatcgatatagaaaatctttgtccatattggcagccgcgcatggcgacaaagagttatcctgagacgaaaatggatcaatcctggtggaaatggaaagaacagacgcagaagttttcggattgacagaagtagagtcaccgctagagaaacaatctggcgagacgtcgctgaccttgagaaagatcacgccgccagcaccgtgcaagtctagaccttgccttaaaagatttgcagctcgttgaaaaatccggtcattgctatccgaggatatcgatgaactgctgccgcctcgacgtgagcttctgaatgaagccgctgcgtttgcaaaaggctctacgtctgaattctcgttggaaactgcgcttgaagaccgagggtcaccaatttgagagtgcgcatcgctattttcagagctggcagatcggctcgtccgagagtgcgccgatccccgcgaggaagaactagagtttgagctctgggagcgagacatgtggtcattgtcggcgaaactggatttgccatcaacgaaagaacgcagactctgcgacagccgcgaggcgcggtgcccttcgacggcccgtcggctgacgtgtagatagtccatgaccatcgctgccactgttcctagtgcgtccttcccatcgtcagacaggccgtcacggggttgagtatccaacacaaacaagcatcctagattagtaccgctgtcggtgatcaagggtgttccagcatagaagcgagagtgtggctctcctttgacgaatggcaattgtctgaagcgctcctcctgtgtaagatcgttgacgaccagtacggggaaggttccatcatccgtttctgaggcaactgcgactgtttcctgttcagataaaagatcaaatccagaacaatgacgggtgcgtggcaaaatcacagattgattggccttacccaacatatgttccaagcgtttggcaaagtcgatgttccggcaaaaagcccatctccctccgccgtgtacaacttcgagtttccaatatttgtagtcttcgtagcttcggctatgatgaactgtgaatcgtgattcaatatacttgatggccaaaaatcagcccaaggtcaacgaaaatgtaggtagatccgtcttggagatttgaaagataatggaagaattacgtgataaaggcacgctgtgcgttgaggcgtatggctgcctgctgtgcgaacgaggtcaatgtcgtattcggactagacagggagctagattcggtttcaaattcggaggcagcagagcgaggaagccatgctgcgttaagcgcggcggggttggctggttggaaataccgatagacctcgcgagcttgacgatctgcttcgtgggcatggatagtctcttgtgttgggttttccatattgataataatgcgcagatttacaaaatttgtagaatatttctgggaagtcgggatctagtgatggtttcaaagatccaggcacatggccagagtcgtatgacgtagatgttcctgtatcacgccttggaagtggagaaggcaaaatttgttggtgacctatgacgtgcaagagagagaacatcagtcatcgagttcttgattcctgttcgaagattgaaaagggaagctctccaattgttggacctgagctctgactgcttgcagctctgtgtttaatgaggtattggcagcttccaggtcttcgttccttttctgttccgctgataacattgagttcaaccgggtactcatctttccattgtaatggaatttctccatttgagagatcgaattgtgctaaatcgtccacagtattgaccccaaagagagcactatgtgctaatgcgagggagagaagaaggtagcctgatgtaaattgcggtcggttgctatcccggatactaatcccgaatctagagtatcaattagtaaatgaaatgtcctaactagttagtatgcctaaaaaccatgctactaggctctttctacttatatagtatattagacatctattattcttaagctagacctgtttgacccgctatcctactgcctaaggggctttggttgaaggaaatagtactaagttaatatactgaaattgtaattagtagttaataatatcgctagagtaaagagattctactttatatcgaagacatcttttatatttatccttatgaggaggaatagaagatctaacgcttactctaataaagagatatagttaaagagtaaataagatgactattttaagtaacctagagataaacgtttaataatctatctactataaagacgatatcgttctttggaaattatatctcataaagtttagcttctctctcttttggttcactattataccttccgccgttagggtttttttaattcactatctccaaactagaatggctatcaggattagtcttagagggaggtaacgatagactcacccattttatttcttttcgatcatctaggatgattttagtctttataaattcttcaaatccaccaaagaaccgctcggcatacgcctatacagttcttaccgttggtcgtccgttctcgtttagtcggcctttagtagaaccaatgtaccagcggataaactccttaatcatctcgtgacttagggctggacagccaaacgaggtcttatagtatttaaatctattttctggcccaaagatcaacattttatcgatataagttattggtctcggtaagccttttgtctttctccctaattaaatcctcctatctgcgggctctagggtcataaccgtttctttcccgttaaagacgacgtctctcttttgcaatcttattatacttagcaaaacactattttctacccatgaataattgcgataccataagggggaagggtatttcgggtaaatgagaccggtattgatttagagtactgagaaaaaggcgccgagagcgtaggcgtatgaataatcaacatactaggctaggatatagtttgcttttatatttgagattcgaggtcaagccataatgagaactcagaaagaacccttgaccgcagcattatgaaatagaggcagccctccacttcctcctacgcataaaaataacgtatctccttgataagatgggtagggttcagaaaataagggctatctactaactaaacatcgcagtataaccgaccctatgggcctggtccattaaaggtatagtctgtggtggtctgggtgatcagagttgctcactgattggacacagagtgtcacagagtagtcagtgaggatccaatagttaagcatttacacagtatcagtcatcatgcacgtgactgctttgagctgatcactgactgagcttgtgctgatttgatgcttttaagttgtatccagctcctctaggaagtttaggagatgataattgcgagatcaagaataaaacttctactaaatagcttgcaagatgctacttgtcctaaatcttacaacctagtctgtatcttacatatcctggcactcgagacctttccctttcggcttcagtgctcaccaagtgctcaccccttcatcccgacgtgatcacgggccattatataactaatcacctgatctgctcactaagcatcattatttgctcagtgtagggatggatgcgaaattcaatttgcccctagaataacatgttggactctgctttgtacattgaaaattcttccagtggattagattgtgcccgttgccagcaagtacccgccgtcgacggcaatagtttgaccattgagatactgattcgagacagtaaacaacacagcagttgccatgtcttcatctttccctggccgtccggcagggattttgccttcaaacctctctttgggaattgtgctcttttgtttcttgtcactcccatgggccgtcatttcggtcggaaagaccccgggtgcgatactgtttacacgaattttgatttgcgaggaaacaatctcgtaggccaacatcttggtgagatgaattgcagccgccttactagcattgtatgcgaagtgacgctgggctgtttttaggagacctgaaatcgacgagatgttgacaactgtgctagaccatccatactcatcctctgatcccttgctcagcaagggtagaaaggcagtggtggtaaagaaaaggtgtgtgacattagtccgcatgacatcttcccactcctggatcgtgctctggtttttgaacagctcttcctgcaatgctttggggttgtcctgatctgtgttcagatgtggagagctaataccggcggcgttgatcaaaatgtgcagtttcgactccttcgcggatatctcgtcgactagcttctgaatcgactctttggaggtaatatcggcagtgattgggacaatctggccaggaatatccttcgagtataaatctgcaacacggtccaacttttcctctgtgcgaccggtgatgtagactttagcaccattcacggcgagagcttgagtggccatcaagccgatgcctgaacctccacccgtgacaagtgcgactacccactgttagcgacgccagcgctacggcaagcccgtttctataatggtaactcacctctgtttttcagcccgaaaaggtgttcgagcttaaagctccggttactttcttgagctgacatggtgtttgttcaaaagttcaatggtatacataatgcttgtcatacatcgctcgttatatgttctccaacttgctagtcttacgtcatcctaatgtcaggctttacgatgatgggtacttgatgtaaaacagggaaaatgacggtttggggtaatttattcactaagaagtcattatgatgagacattgaaagaatcactccgtataatgatcagaaataggtacagtttcttgccaacattcacttaacctgtctaaacccgtctgtatcttgatgcttaaatcaagatctagaccttctaagatccatcgagcatcagcaggttttcatcggagtgtccttgtattggtcggatacatttactacgcggaaatgatatgtttgaactacttgatcttagtgcatgacatgtgccaagccgcacaactcgctgggttaaaaacaggcatcgaagctttttttattgcactgaacgagtataaattcatgtatgcttcgtgaaaaacagaaatatagcatataataaattggttgaaagtgaaataatggcaccccatgagcaaaacgagcagagactcataattacctcaaatcgccttccactttccgtcaaatccaaagacgacacttacgaggcgattccctccagcgggggattggtgaccgctctaaatggtttgagctttcatgcctatctgtggctaggctggcccggggtcgatatcaatgaacgggacagagaaagcgtcgacaaagccctggccaaagaaaatgcctctgcagtatacctagatgagagcctcgctcagagtcattacaatggattctctagtacgtggcctatattctcgggtatattactacctcgctgactaggcgtatttagacggtgttttatggcccacgttacattatcagtcggatgcgtccttcgataacgagtcatgggacgcgtaccagcgtgtaaatacgatattcgctgatcgaatcagtgaggaggcggcggatggtgacctaatatgggttcacgactatcacctactcctgctgccacgtctactgcgtgagcgcctccatgcgcaaaacaaaagatgcgctataggattttctttgcacacccctttcccagcagatgatttttggagaggtcttcctgttcagaaagcgttgctcgatggtgtccttggtagcgacctcgtcggcttccatacggacgagtataagacgaacttcgctggcgcctgcagatctcacatgtaaggtccgggaaatagcattgaaataccaagtgactaaccaatttattagtggtgcagaaattgaaggcgacaatatctactacaacgaccacactattagcattgataaatatgtcgttgggattgactgccagagatttgctgatgcactcgatgatcctgaggttcaggctgaaattcagcagattgaaaaccaatataaggacaaaacgatcataatcggcgtggaccgcatggactacacgaaaggattgcccgaaaaattgcagggcttccgagtcttcctcgatcaataccccgaatggagtaaaaaggttgtgctaatacagatcgccattcccagtcgcgaagatgtcaagaaataccaggatttggagggggaagtgagcaaattggtgggccaaatcactgggcaatatggtaagtgggtgcccacttctggtatagggtatggcaggtctgtagatttcaagctaaataacaatcagctactcccacgtcgacaccattgatctatattcaccgctcagtttcttttgcggagcttacagctctatattcggtgtctgatgtctgtctcctcacttcccgccgggacggaatgaaccttgttgcttccgagtatgtcgcttgccaagaggctcgacacggtgtgttggtgctctctgagtttaccggtgcatcggcctttatgaaaggcggcagtctgttgttcaatccttctagtgcagatagcctctcaaatgcgctttacgaggctgttacaatggagaaggaggataggaagaagatgtacgaagagttgcggagttttgtcaccaccaataccaggttagttgtttcctttcatcttctcaaattccctcacctgccatcagaggtccctcaggtcttgtaatcagcaaaactaacgcccttcagtgcgaactggacggagactttcgttggagatttgacgaaattgcagaatagatagcttttagagtagttttaactcttgacattggtcagaatcatttaattgcttcactggtatatccgactgccccaagagggctgtggtacgacgtaagcactatcaggttctaaaatcaaattaaatagtccacgatatcataggctagtggcctccgagatcttatgtaaagtactgtcaagaatgggatatggcccctctaggccctgagcaagaaccttggttattgttatgatctagtggtaaattacgctgccccaattcgtcaagtacagctttatttggtaaagcctgtctatgataggcgcttttagagtgaaatttatatttattttgatacagaatggccactgagatattgaaagtaagatagaatatccagattttgttttgattttgactgttcgatctgaggtttgtcgctcaaccggctggtcccgattacatgacgtcgtcactccaggttagtcgtggggctaggcattccacttggaatttaagatctcagtgacggcctttcactaagatactcatcgatacttttttctcaattctttagggtgcaacaacttccatgtctgatagcttggccctggtgctagttggggatgagggggttgggaaaacagcgcttgcagtgcgggttcgtcatgtatttcccctattttaatcgagataaactaatttcgagtatagttctgtttagagcaatacgccgagggctcagaaccaacgctggatgattcgtatcgcacgcgaatggtggttgatgaccggccttgtgtcctcgagattatcgacacagcgggacgagatgaacatgctgcgctccgtgaagaccacattcgcaatggggacgcatttattatcgcatacagtatcacctcgcgggaatccttctctcacgttcgagcgtactacgataacatcaaggaggtgaaaaaggtcttggcggaaaatactgtacagcagccgccttctgaacacccttgtcgcgtgcctatcatcctagtgggtatgaagaaagatttggaattccagcgtgaaatctcattcgaggaaggacggaaatttggagaatccctagactgttggttttatgaaacatcgtgtggcaagtaagcttggtggggaagatgatcctattatgaaccccttgttgggggtgctaactagctaactatgactaagctgtgacacatcggctaagactggctcagatgtagagaggacgttcaatgatgctattagatgctttcggcaacagaatcttcccagtcctcctccacagccagcatcgaagcaatcaaagaagggccaaaatgggaggaaaatctatgacccacgcaggtgtatcactttgtaaatatcatagccgtgcagtatgaagtcagttgttatgcagggtttcgatgaataattgctctctcgtaaaccgcataccaattaaaggcatcccatgcagagtagagcgagcagccgcgaattcgggcctcatacaccatttcggccagttggcattcagcgttaaggcatccccgtttgctccggtggtactgtttgaggcacgtcctcgcatcaaggtgcaccatcactgagggtgaggttgccgcaattgttcgaccggtaagtgctagtattagcagccgatatgagaaaatggagggtcatgcctctcgaaggaatttggtatctgcgcagtcgcgggagagccttcgcggcctaaagtgccgacaccatattactcacggattccggcagagtcaggatcggtcagaggggaaaccgagcgtagagcatagtttactaatgacgagggggccctgcagtggggacaaaggggcaccgacagccctgcctgcgaaagaggtgtgagagcagagtcgttgggagtagtacctgcgaccttcctacattatttacctaagcacacaaatatctacgggtggctatcccaatctctttcttacgtgaacttgatttataccgtgaagttcactcaaatatgaacattccacagtcaaatatgcacgaaagcaatgcgcctccgctcctggccaatcacagtccacctttaaccgccatacttgtgccgatcaggggactgcggggccaggcgactgacgcggctcaggatactctcccccatcacactcatcaaaccaaacgaccaagttgagagatggcactgctgagaaggttgtcgcctgcggagagggcgagcggcacggaccgcagcgacagtccactgctgaaggaaccacggagcccctcggggccacggctgctgaaccgcgacgaagttccctcgtggtatggccataatccatacatacgaacgagttataggccagtgacaccgtcaacgtctcggtgccttagcagcctgctgtaccttcacaatgagactgtgaatgtttactcccatctcatcccggctatcataacttcgctgggcaatgggcttctttacttttatttcacagcatcttttccggatgctaccggagtcgatcagcttgtttttcatatctatttgacaacttcggtcgtttgttttggtgtctcgtctgcataccatacttttctttgccattctgcccctttcagtgctttgtggggacgtttggattatgttgctattgtattccagattcttggttcttttgtctcggggatatatatcggattctactgtgaaccacatctgcaaaagctttattggtcaatggttcgttgatgatctcaccttgtcggtcatctgactgaatttctgatatacagattggcactcttggcttcttgactgggtttgtcgtggtgcatccccgacttcagagccaaaagtggagactgttgcgattatcaacattcgtcgcgacgggactttcggcatttgcgcctatcatccacgctgctagtatcttcccctatgatcagctagatcaacaggctggattgcgatattactaccttgaagggctagccatcgtgatcggggtcttgttttatgcggtgcgttaatttcccaaactgatgcagaattgatctgattggtggcagacacatttcccggagtcgtggaaacccggaagctttgacatttggggatcgtcgcaccagatattccacatcgccgtggtcattggtgcgacgattcatttgtatgggattttggttgctttccagtggaattatgaaaatcagcgatgccacattggttgaggagatgtattccagtagcttacctgtggactccatcctcccaggctgataagggctggcccatacccaccttcccggattggaagaagatcagctatacacacatgacaaagtacattatgtcgctaaccctaacaacaacgttgaaactctatacagaactagcttagcttggccggatgcacccgatacccccgccccttgtcatttccacttgccacgttttttctcttctagtcaaaacccaaaatggagggaaaaatcgcagtcgtgagttgtctcgtagttgctcggatcgtatctaacacggccaggattccgattactacactctgaccaaagattgggagcctgaggactttcagtcgtgagttgcggatatcattcccacggtgttttggcttttaaccatatgtatcagtgaaaccacatctatcgcctcgacaatcgcgaagggtcggttggaaaatggcagacggtgagtagcagcctgtggagatatgagctttgctaatagtatgagcagataccaggctatgaaggaagatgactattggtcggtcgcgacgcttcaatgtaggaaactcgaggctaatcatagcatacaggagtccttccgatgaccagcaattcgaggcttttgaaattgggtaaatactcatttttcgtctttcgttcggttcaaacagcttatcggttatacccagtcatatggtttttctcgtgctagaccatgaccgagagaaccccctccaccactctcccatcggcaaatctcctaaggtgagagagcgatctagattgatggcaaccttttactaagagtactctagcacattctggacattggcactggtaaaggaacatgatctatgtaatcaccccacctattctctccaatgaacctcgctaacattcacctagtgatatggcagatatgtatccatctggtacataccacttcctttcttttctcctttgcgccagactaacaaacgtcagcaaccgtccgtggcgtcgacatcttcccccctccggtgacatggatgccaccgaactgcgtactcgaagtagacgatgtcctccgcgaatggacctggagagtaccattcgactttatccacatgcgtctactgctaggagcattcacacccgagggatgggatcaagtgtacaaacagtgctacgagtgagtccctccatttacatttcccctgaacagtatctaactcctatccagcgctcttacccccggcggctggatcgaacaaatggaactagacgtgcgagtgtacagcgacgacggcaccctgaaagaaggcggcgttctagcctcatggggcgataacttcatcggctgctccgagcgggccggtcactccctcctaacgcaggagacaatgcggggcgcaatggagaaggccgggtttgtcgacgtgcaggaaaagttatacaagattcctttagggccgtggccgaaggataagattctcaaggaggttggacagctccaatatgcccactgggttgctgcactggagggctgggctatgtggctgctcactaagtttggtgcaccttcgccttggagtaaagaggaggttcaggtttatctgtccaaggttcgggctgagttgaggaatcctcgtactcatgcttatgaatatgcgtgagtctgatatgttaccccaggaggttatgttgctaattgtgtttagtcgtcgagtctggggtaggaagcctacggcggaagaactggccaacccagtcaagaccgagcctagttcctaaactagcattgaaccgattactgtgtttgcgtttaccgagttcgttttgcgaagcgagtttatattttgcatgtttaagtcctgaggcatgttcgcctcaggctacgacatgattttctacgtatagtaccagaatgtgattagcttgtctgttatcaatcaatttgttaggattcaaccctgggcgtttgctccacgatcaattgagcagccttctcaaactcggcttctacaatcaagttatctaacccagatcgttcgacctgcaatggaattagccaactctcaacaacgaacaggttactgaccagctccagtcccttttcggaattagttccctgcaaccgaaccacaaccggacatttgaaaccacccatctcagcagcggcggcaataatagcctcggcaatcatgtcacatcgcacgattcctgcccctgatcagctccatcccctattgttaacgtgtatactcaccaccatagatattaatcaaaatccccttcacccgttcatcattcttcaaaacctcaaaagccttcgccaaagcctccttcgtcgccgcaccgccaacatccaaaaagttcgcacacttccccccatacaaactaatcaaatcattagtcgccatcgccaacccagccccattaacaatattcccaatattcccctctagccgcacataattcagccccaattccgcaagccgatgctcctcctcctgttccggcgctcgttcctccatcgcaaaaagcccaggctgtctatagctcgccgcattatcaaacccaaatttcgcatccagacaaacgaactcaccatcctcagtgcgcaccagtggattcaactccagcaacgtcgcgtctttctccttgaatagcttgaacatctgcaccagtatctggtggatatcccccatctcggaatccgagaatcccagctcggcttggagatactcgtcgatctcatcagtgataccggtcgagagtccgaaccggagtttatgcagcttgtcgatattcgactcgatgtttgttccgcctgccgcggagatgagcagcacgggcgaggcttgctggcggtcgaatgtcattgcaaagtagaattcctgcgcgatggagatggcttttacgatgtagagcttgtcgacgcaaaggccgtcggctggggtttgtgctgttgttaggtagtacccgagcatgttggcggcatttttgaaggcttcggttggactgatagcggtttattagattggttcggtggttatttaggattgggaactcacgactcgacgtgtcgaacgccgctttggccgtcgctgttgaatttgcctttgccgcggccgcctgctaggacttgggcttttattaccgatggtccatctgtgaatgttagttttaggatatggaatcgaagaggatggtgtgaacttacttataacggagacgacatgcttggcttgctcgggggttgtaactaggaatcccggtggaactggcagtttgaactaggttgtataagcattgaggtaggctgtgtttgtgaagggatacttacttcttggagcagtttgtgtgagtggctttcaagcagactcaactgtcgtacttgggctttgagaggtgcatagtgctgccgatggttagtatcgtttcaatcactgctagattgtacgaacccgttggaaggtgcgcgcgatcgaacgccaagcaatcatcgtgagttatatctttcatgctagggtgtcagctgtcagctccaagaccattccgaggttcgatttatgtcttttgtgttatttggcgatgacatcaatgtatcgattttggctagttcctggggttgagtttccggaagtttatttgatatgaccatcgcttgaccgtgatgatttcaagtattttcttggtgcaagtatcgagagagcaggatgaagacttcaatatagacatgctcaagactattacatggccgagtcaattggtgagttctcgacacttgatattgctcgacgtcaaccgctagcaaaatacgtcactgatatcgaatctttcccttctacatcaatttaatcacaaatctcattccaaatatggcttccttacaacgaatatctaatctctgactccgagcctgatatctctctcccaagcaacgatacaataacctacgcgagccacacgagagatatactctacggacagaagtcggcgctagtgtatacacatggccataccgtgaggtacttcattgtagtgcaccagccgtaatctgagcggagactggatcctctggctgtcggtccgttccgggccatcgttcgaagagggcaatctcccgaattcctcttgataaagcatccatacgggatttcaaggataaacaatatcgtgtaagcggggtacaaggttcagggattagccgtagcacacatcacattaatgataactcggcgcatcgcttgtcaaaagtgggggtggaattttattccagtcgtcccaaagtagtgtgttggcaaaactagcagtttcaggctgcgccgtttgcttggcttctcgtatcggtccgatggtaaattcgccagaagatggaaattggtgaattgctttttttgcacatcgtcacgcgaccaagtcgcactgaccgcggggatggatgatgcgatcggccgcattggggccatagcgctgtcattgcaggtttcgaagagcctcaatctgtgcgcaaaattgtgggaatgtttcagggaaagtcttgctagaacctgttatggttctggaattcattttttcttgaaatgtggtgtaattcgtagtggcccaatggggatgtgcttctcacaggtaacgagaagccagtagttaaatccactagttacctttcttttctttgttaggccccaaatgctgtatcaatctagacatggtctatgatgactgtgtccgttgcctccgggtggctgcaggctatctctctgtctgagtaagacatctaacctcgagcacggcatcttactgtcaaattggtcaattagtcaagtctgtactcatctgatcgttcccaaaatctgacagacactagtaccaagaatgttttagcagtgtttcacgagtactccgtatgttgtatatcgttttcttcccttaaatggagaaataaggccccgcttctttgtatgaaccccgtgcttttagaccttgacagccctcacgtaagcgacggggcgcatcttgtcccgaaatgagactttcaatagcctcacgctaagaattgtgtaagaatacccgaccggccgagtcgcggagaatcatacccgggttcgcctggatgtatgccatggtcgatgcctgtagataggtgccacgcgggtaatcggaatgcgcgcagcgttcattcgccgacacaaatgaagtcttggcttcgagacaagcaatggacgtataacctgataaggttaaaccacgttgacttgggcgaaggtggaaattgcaacgtgggaggctatgcctattcgggcttagtcaggcgtgaccagcctccaagacaccattttctcccaattcagagatttcaatacaagttcatatgatatcagcgctagtgacgagttagtgaatgcaaaatgaaatcataccgagatcgccaggggtacgcaccacggagaatatacacagcaggtttggcttatcaccgtgaggcttagataggcgatcgcccctgagagcccagccacccagtgggcctgacttggccgacgcagagtttctggcaaatcaaaaggcaaagaaagcacatctgatcgctcgattctgacgctgaattttgtttagaaatataagaaaatggccatttcctgctgatgttcctgcaaatctccctcagtcatccgtcaccatgaggcagtcgacacccattctctgggttgtccaggcttgtctagtatggctgacattggtatcggcatcgcctgtcggttctcctgatctggtatcggacgtcgcgcttcaggcccgtgacaccaagccgtttccactccggattctgcccctcggtgcttctatcaccatggggtacaaatcgcccgatggaaatggatatcggaaatggcttcgacagcaattgcgctatgcggggtgggaggtggacatgattggtactatgaagaatggtacgatgcatgataatgtgagttacggttctgttcatcttaagaatatatactgactcttcaggaccacgatggacacgtcggctggagaatcgatcgaatagctgatcatgccaagacgatcatcccacaacaacctaatctaatccttctcaagtgggtctccgattgccgatgccatctccttgcatgctaatatgtatatccccacagcgctggcacaaacgatgctctacaaaactacaaagtaaataccgccggcgagcggatggactctctcctcacctacctcttcgacaacatccccaacacaaccatcatcctatcaaccttgacatacaacggaaagaagccgaaacaaggcgcatccatcagctcgcaatacacggaacttgcagcgaaacgccgagcgcaaaacgacagcctcgtcttagccgatatgagcaccttcattcggtataaccaattagtggataagatccacccgacagccgcgggctatgaggaaatggcgtccgtgtggtgggcggccatccaacaagcggagaaggaaggccttctcaaagcgccaaagactacctctacatatagtggtacgatcagcaaggcccgcgagaaggcactcgacgatagcacttcagacccggatctgcctgcgtacacggccccggctcagcctaccgtatcacttggtagcggctcgcctcgagccgagtggcatctctggactgcgttccagattatgagtatgttccctttctccctgtgtgtttgacaagactaaccttatcagtgggcattggtttctatatgatatgatgggacctggaacaaataatcaaaaataggcaaaacaatttaaaacttactaaatcgttcatcccagcctcataagaggcgtgcataagtctaggcaaataagccatgctatacctaacctaacgaaaccaacccaatttcatcactaaccaaccccattaatagaagcatatcctcttattaacctcggaagcacgcagcctcccaagaaaagcacaagcagtctccactatcctcggcctcgaactccaaccctccctaaccctagactctggccgacctcttcacctgtccccgcaataggctgcgtcgtccggatgccgtgcgccagggtacaggtccaccaaatcagaggaataatatagccgacatatcgcagaggcgcggcatccgggttagtgtggggtcgctgttaccgcgtggcgctgtcttggagtgtggctgcgatgggagttcttgacgggatgtctatgggattgcaccatttctaggcagatcaggttagttctagtgctcggaggaaggatgttgctgtacggggaaggccgggagtagctctcgggtgtctcgttctgaattcttttggggtgggtttgccgcaaaaggcccgggcgtgtagctatccttgcatggatgtcaatgcgcgttaatcgcatgtaaacttgatcacataactctcgccaatgagataaatgtagacgatggacgtagaaatcatacaacacacccggaatgtgagcgacagcaatgtcaacccgagaaattcccggccccgcggcccggcgacaaagctgaacttccaacctgggacaccatgacatcaccacctaagctccgagaatattatttcaagctcctacacttccgcacctacaacatcctctctacagacctctaaacctcctccctctatccaatccccccaaaccaaacccaaaatggccgaatcattcgctatcctccgccaacgccgctccaacgagctaaccagcctcgccaacgagcacctccaacacgacctcaatgccgaagaccgcgacaagctcaacgcagcctcgagatcaatctccacgtggacggccattgggtccggcgtcggtattaccctcggtcttgtcgccgccatccgcttccgcaactcgcgcaaggcgttcttctcagccattcgcgcgcaggatagacctaccaaggttatgtttgaggatggacggactggtatgttattttgattgtaatgaaacaaagatcggtattaatttgtgtcttgtgtgtagaggctattccggacctcacgccgctgttgaagcctactactctcggtgatttcgcgacttatttccttgccgcggctggtgggttgttcttgggtggagagcttggtaagattgtcgatcgtatgatgccgagttgaattgtgctaatggaattctgtaggctttgctggtggtgtggcgaaagggacgtggagtctcgacgcggatccccagagcaaggagagaattgagactgctttcaggaaattccgcgctgatgtgctgcggaaacaggctgatgcttttgataagggggagaataattcctatctcctctagggaatacatgtagacataaattggatcttaggtgtacacgattttgtaagatgatgtcagttattttcattcgcaatgtcacagtaatatacaagttataccttcaaagccttcaagaatgccgggctctcatagccctgcgcaaccttcgaaatcggcgtgagatacgcctcggacgattcctggctttcctggatcttccgaacatagaattgcgcaaccttgagccacatcgccttctcactcgcactggcttcagacccctgccaaacccagagtctgttcccagcatcgtaaaggaagacatctttaccatccaagtcagaccggtcaacccgcccatccttaacaagatcaagcgacaagtccccagcagcatcactgagtctgaacagcctgcgcgagcgaacaccctcatcaacatccttcttcgcaaagcgcccaggtctagccgcctccaacgtcgacggcgcgacatccctcccacccagcaaatcaacaaagatcttcgacctcgactccagctgcgacagcacctcaacatcaacatgcttcgcctgcgtcatatcattaaccacctgcgccgccttcgccttctccatcggactacacttcctcccctgccaaacccagatcttatcccccttatccaaaacaaacacatcattctcatccagactctgccatgtcggctcgacctcatgcacgatcaacgaatccacacgcgcaatgcctgggtgtttaaagatacgcagtaacgtcagaacatcctcccgcggctcgtgttcgacatgcgtgaatcccgagcgcacaccaccagaccggaccgcgtaattccggaacaaagcaaggaactcgtcagaagggtgttcctgcacctcccgatgctgcgtcgccacgccgtgcaggaactcgtccagctcggcggtcttgtaagccgcgacgccggcttcgtcttgtgtggtcttgctaccgagccagaagaagatgtcgtaggcgagcttggtgtcgaccttgtacgtgtgcagcacgatgaagctgtcgccgtcgtagaactgcccggttttggatttcggccacgggattacttggaagttctcgatgcgccagatgctcaggccgggttcttgggggaggtcttgccaggcgggttcggtgagggcggagttgtacttcacgcggtggtcgatgtcgctgccgattagctcgacgttgctgtctttgatgtcgtattcttttgggtggatgaggccttcgtggggtgccatggttgcgattggtgtctggtagctgtgttgtgtatgatacaattagagctgaggtgagtgttgataaatgataaagtgatgatagcggtgggtccatggggctgagccgcggggcatcattttttgggagcaattggccaatgacgtcgggaatgttcgagctactatttttagtcagtgcaacagacgtgatgctatgtttacatgaggctggtagctgtgggagaggctggatagagggcgcagtaggcgtttgagccaccatcgtggcatgtcagaagagatttttcatattttcgtcatccgttggtccatctgagtctgatttcaattcagaaagtgctggtgacagctacagctggatattaggaagagctcatagattgaacagcgaggttcatttgagtggacaaaatggaagccgacgataccaacgtgtcatgctatgccctgacgaaattttcagcagaaatttcatgcgcgagaggacacgcagcaatgtatcccacctttggggctaggtcgaggtgatatcactaatagatgtactccgcacaagatgctacattgatcaagtttaatcccaagtcctgcagcttgcatcaagtcaagtcagagaattctcaaatcctcatttacaaataaaaaccaattggtgtaaatcagtgcacgaatcgatcggctctgaactgaaattccaaatgtcctgaggtatatgaaacaccgagggaaaatagtatctacttctcataactctagtaactgctcgtgcctgatttcccagacgcacaaagcaccgttaccaacgctaagcgtcaatatgtcacgttttttctcgctcgcataaccatcgcgcacttttccatatcactgatcacgtttaccaacggccaccaccggcaccgccggcaccaccgccgccaccgaagccaccaccaccgctggggcgggcgttggcgaggttgacgcggatgcgacgaccatcgagactggattgtattagctgtgttcgtagtatggaggagggataacatactcctgctcgttaagagcgttgatggcagcctcggcctcctcagcggaagagaaggtgacgaagccgaatccacgggagcgaccagtctcacggtcaaccatgacgatctagagatggaacattagtgtcttgttccgaagcaaaaattggaaatttgtggatttttcacgtacagagtcgacaatgttgccgtactcaccgaaggccgcgcgcagcgactcgtcgctggtgtgccatgaaaggtttctagtaggactgtcagtataacgcgtccagcatcggaatttgatggttttggacatacccgacgtagatcttagacattttgaaagaaagtgggagtcacgaggtgttgatgaagagaattaaaagatgcggggcatctgaggagatatagggccttcgtggcggtgagaggcaaaattcattcgccccgcataaaaaagtgagcacgtattgccaggaggcgaaggagcagactctgccggatagaccagctcattcaatgccattttgagattggtctaattctaagcattctgccagattactattccccaatggagtctcccacataggtagctacatatgatctggtcttcctggacgcaatggcagaatttctagcgaacaatggcctgacggtactggaacccgacagaactaccttactactgtatgatcaacagacctgatcttcttactaagatggatcatgcattcgagcatggagccacagcgccaccatctagaccggtaggatgaggtacagaagtggatatggtcaagtcaatcttgcatacgcctccgatggaagatacatccgtatgctaaaaaacagcttccctacaattctccaccatctatctgcacgagcaaaaacaaaaacatacaacagtgaggattcgctggtggtcacccacccaactactaactcaccggcgtgtggcttaagtacggctgagcggacgggaagccctgttttccacaccctatggtcgtatgtatcagattatgtttcgaggaggattatagcagatggctggtgagtgttacgtaggatgggcatagtgtaggagccctaatttttcggggatattcacctaggactctgaatgggaagccaaagctatggagccactgatgagcactaacactaatgacggtaaggatatgttagtcctgcccgaactctcaaatatcagtgatgacatacctatcggcgagaccgctttttaatcatcttttttgggtgtagtgcgaaggcaatgagatgtaatcgtggattgcaaaggcgttgcagcggcttctaaggtatgaagggtgctatagagggatagtagaagcgtgtgagattcgtgatccgcttttcgatgattatttctcgactgtgcttggcttagcggcacagtctgaaaagctgagcgtcgtacctatcgatggttcacttgaagtggaaacgacgatggaaattgacctttttatgggtagagatgaagtttagagttttagcaaggcaaggccgggggtggataatatctcggatatagaatagtaaaaagaagctaggaagaatgaccgaaaatcgttctggatatccatcatgagttggcgagtgcgagcgaccaaggtcgaagtggtaagaagatgagaagaagatgaaggcaaaaatggagctgtgtcgggctaatgcattgaaaataaagtgccccagaatgatcactttagcggctgtggaaccgacaagtcgttgacctcttgaaatcgcgggaaccctggaatatgtgctggctagcatgcaaaaattggagattggctttgaaagacttgtaaatgtaacgtcatggtcatgaatcttggtcggcaaacttcgcagttagtctatctacgctaggcccctcttcactgaagccggaacccaagaacttcaagtatccccgagattcaaagatgcagccacgccacaaactgcctagcagaccttctcgcctaggtcagagcattcctggagacgaggagtctcgtctgttgttgggaggtgaaaagaagaactgggaccaaatcgagaaacaagaaatgagcagagtaaaacagggagtccggagtttctgcatcaaaatctcctcgattccatctatcctttcccaaatcatcagaaaacgcactagaatactttccctagaagagagtgttctacatgatatctacaagcatcttcccctggtcgataaagcgtgtctatcgcttacctgcaaacaactttacgatctatttggagcaatcttgaaagaaaaggaattggaattcccacgacttttactcattggtatccctatactatatgtgaatagtagcaaagtcccacgaaatcaactgctccttcgacttgagagtcgcaactgggcatattgtggaaggtgtttgaagctccatccccgaaaggaatttattcgagagtcgctcgcgcgcccagctttagagaggtcttgcgcagactatgcgggtatagttgacctatgccggtgtgttgccttgacgattcgagacctcgggtctattgcgaaactttttagtcgccctacgccgggtcaaactaagttcggtccattcactttttaccgtattggatcttggcctttcttgagacactcttgctcattacccactacacctgactacaaggctcggttcgcgatgcgtatatccctcaacgagtttaaccagctggagatgtctgctagttatggcatattcttttcttcccctgagactctaaaagccgtgcccatcttccactgtcctcactgggaccttactactttgatgggtcggaaggatgccacccaggtgtgtcctgggtgtcggaccataagtataagacatcgtcttccagaatccaaaggaaggaatgtagttgttttcgaagtgtggcggattttaggaaaccgtagggcaccggattaccgttggcttgataactgtcgtctcactgggccttcatatggacatgatatatccaggtaagtgcatggttgaatattggactgaatgggcttaacagcattattctagggaggaaagctcgcaaagtgggacgcgcactatttatgatacatgggagggtaaataccatggagcccgattttgccaacaggtagacgggccaacaccgacacttgattacaatatggcaaaaaaattgaaaatcgcatacaagcatgggctcatttaggtagatacagtcgaaggggactgcaggaattatactactcgagtgttaaattgaggtaacttctatagcctctttgctattgtatctcttttgggccttatttttccaatgtaactgccagcaaaggtattgctatatactacggttcatcttcttttctttctgcgcttgtgtcttgtaatacagctaatggctttgggacatgtcatgctggagcggatgtgttgtttcggtctaacggccaccacagccaggaggtcatgtaatcacttcttgatagagcatatgcatgtacccacgttcaattagaaaaggcaaaaattatgtatttcacggtttcagtctgcgaaaaagggatggcctataattacatgagttaaaaatatcggatagggcgcagaaagctgaagccggtaggttggtgatgctatgcattgaagctaccatattcttttacttactgtgattccaatatcgttcgaatattattcagcttgggtcttcatgcggagagaaaagaaaaagttttatcgagatcaaaatgaggcgttgggaaaattccaaccccaaatatgattatcgtctctgtgtagaattggaatgagagttctaactatatgagagaaaggaggcatatattcttcatgtttggcttgtaatgcacaattccaaatattgggatatatgggctcattcatcttcatcgtcactccttgaatatattttgaatatattctcgagtggtcagaatagaaaggacctaatagtactatatacaaagccctctgatcgaactagtgcttggataactccttccaatcaaacccacaatgcggtggtacaccactgtgactagtgagggtgggaacagcatcggctttgtttatttcaccgcatccagctagcaacgtgatgaaggaaatgaaatagttcacttttcaagagaaataggacattggcacaggctggagattatcaagtcgatgataacctagacagaacagtgccaatacatcgtcaactcatacaatcagccccaatattatctgcatgctgttgtaggtgaacctaccggggagaacagtgagggatatgacgaagcagttatcgttcaaagaggccaacctgaagaaaggaccagcggatatatttccgccaaaccattcacgccctgactctgcaagtcgaatgcaccggagtggaagcatcagatctagatggaaagtgtagctcaaaaagaataatgtcacgagttctactccggttgattatctcatctattgcccggatggtctagtggtacgttgcagtctcttcctcaagtcataaatttccttgctaatcccttctaggtggctttggctttgacaccgagattgaagcgtcgtatgaaaaggagtgcatgctcatagtcgtaatacatcgggtcactcgaagtactgtttcatcttcggctttttctatcacacacataggcagtgcctggtgcgatgcgttttaaaagtctaagtagatggttacataaattatgaatccgcctcataatctatcttccgcccggatggtctagtggtatgattctccgtttgggtttccatctcaaattcggagaggccgcgtgttcgaatcgcgcttcgggccctcattctttttttgtttgtttttgtttttgcttttcattatgcaatatccacctctaatttttcaccctctgcaatcccactacattgactgacccttttagctcgatgtctaagctatcacgatctagctccaaaatacggtgaggtgtctacgggctactgcctactccgtacacggcgaagcgtccggcaacctgcagcgagtggacggaaatttccccagtctgcggggaaagcttccaaattacgtacaagtttagctgttgtcaaaagcaagaggttcaggctatattccagaatacatagccagccagtctttccacattccgtgtctcactcgccaataaaagggagtggtccgaggccatcgtggactaaccatacatagtattaacctgcatgtttcaatgtgatatatgacaatgcaaccagtcgtgtgtcgctgtacatgcggagctcaccttgcgctttcttggccagggaaaaaccccttcattctagtcatgggttccaaatctagaccttggccggcgttggagaccaggggggaattccaaaccacgggaatttaaacccaattctcctgtgcggggattataaagggtgtacctgcccgccggcctagcagtaaacattgagcgaccacccacagcaaacggcgtgatgcagaacctttttctctctgctctggccttcagtgtcgcagccgatgcctatggctcaggggctgccggctgggacgcggcttattcaaaggcccgagcggtccttcccaagctgaatcagaccgaaaaagtcgggattgccactggcgtcggttgggaaggagggccctgcgtgggcaacacttatccagctagctcgatcaactatccctctttatgtctacaggactcacccttgggaattcgctttgccaatccggtcacggctttccccgccgggatcaacgccggagcaacttgggaccgtagtctcctgtacgcgcgcggtgttgccatgggcgaggaagccaaaggtctgggcgtgcacgtccagctaggaccagtcgctgggcctctaggaaagaatcccaatggcggtaggaactgggaagggttctcggtcgacccgtatctcagcggagttgccatggaagagacaatccagggtatgcaagattcgggcgttcaggcctgcgccaaggtacgctggcttccactctgttcatattcagtgcgttctgaccatggtaaagcactgtgggaacgagcaagagcacaaccgcgataccatgagctctaacatcggcgaccgcgcgacgcatgagttgtatgtatggccgttcatgaacgcagttcgggcaaatgtcgcgtccgtcatgtgctcctataacaaattgaacgagacttgggcatgtgagagtgatgctatcctgaacgatctaatgaaggacgagctaggtttccctggctacattatgaccgattggaatgcgcagcacactagtgtcaacagtgctttggctggactcgacatgaccatgcctggcagtgattttaatagcccgcccggcagcatattctggggaccaaatctcgtgcaggccgttgctaatggctctgtacctcaggcgcgtctggatgacatggcaacgcgtatcctggcagcttggtatcttcttggtcaggatcaaggctaccccgaggtgactttcagctcttggaatggcggaaaagccgctgccgatgtaacaggagaccatgccactgtcgcccgcaccgtggcccgtgattcgattgtcctattgaagaatcaggaacatactctgcctctacggcaacctaaaagcctggctattattgggcaagatgccatcgtcaatcccaatggtcccaatgcatgtggagaccgcggctgcaataccggcacgctagctatgggctggggcagtggcacatcggagtttcccgtaagcaagccaatgccggcagatcaaccgcgagtccgataaactgacaatgacgctctagtacctcgttggtcctctcgacgcaatccaagttcaggccagaaaggatggtacgaacattatccagagtacgaccgacaataccacggctgctgtctcggctgctgcatcggcggagactgctgtggttttcattaacgcagacagcggtgaagggtgagtcggacttgtaaccgcacctatgatgcattgcaactaacccgtgcattgcagttacattacagtggagggcaacgttggtgacaggaacaatctcgatccctggcacaacggaaacgagcttgtcaagtccgtcgcagcagtgaacagcaacgtcatcgtagtcgtgcatagtgtggggcccattatcctagagaccatcctagcgcagccctcagtgaaagcaattgtctgggccgggctaccaggtcaagaaagcggaaacgccctggttgacgtgctctatggcagcacctctccaagcggtaagcttccttacacgattgccaagcagttttcagactacggggccggctggaacagtgggctcgatgacaatttcgttgaagatttgtttattgactaccgccacttcgacaagaacggcatcgacccgcgctacgagtttggctatggcttatcgtatacgacttttaattacactggacttgtggttagcgttgctgccacagctgggccatcaaatggacgaattgtccctggcggggcagaggaaattttcgagtcggtcggcactatctctatcggtgtcgaaaacactggcgaggtagctggtgctgaggttgctcagctctatcttggcctgccggactccgccccaagtactccccccaagcagctgcgagggttccagaagttgaatctccagccgggagagccgggaacagctactttcgagctcactcggcgagacttgagctactgggaagtgcagacacaaaagtgggttgtacctagtggtaccttcattgtctatgttggaacctccagtcgggatattcgtgaggatggaaagttcactgtcacttagtgttgttctcatgctttggcttgtatatatttttattcggaaacgacttgtctcttgatgaatctgcaactaaaccacgactcaatgtatcgacagtttctagatccagacttgcttctttgttaaggttcgtaagtctttacccaatgaatgaccctatccctaagacaggtttctgtggggtacaaagaatgaaagaatgagctttgtaactctcccttttattatcaatgatcatagtattaagcaacttattcaaatgtatataataacgattggtataaataacatgttagtccttctcgaagtagcaaaccatcatcatcaataccttgatctatctcggcgactaacttatacagatccgcctgtcctatatcatctcaacgatttacccatctccaagaacaatggcttggtggaacagctctacacccggctgggtcgaaaatctcgtaccgacctacacacaagaaatctacaaattccgactcgaactcgaaggcgagattcagattctagtgcgccacccaggccatcagcatatagtaagccagagacttacgatgacagctagatccctgcgcaagatcaagacactggcgtctgatatctcggtgtatttcccggaccatccattcgtcacgcgcaaacgccttggtttctttcagactactttcccccgactttgcgattttatcgagcggactttgattgagctgagtagaaccctgattcatgatccgaaaagtgagatttctattgcttggcagcttcaggatatattggattctgtatagattgggtatttaatgtttcatactattcaaaatacttctatgtggtgaatttgattttatttagactatcagcatagatgattctacttattctcgctgttgagtcttttagcagcctcatgcatgtcatggtatatatttcaagcctcctattcccgaagttttcacaaccattgtcaattcaattcaatcctatctctagatttcgcctggaataattgctagcgaaaactcacggcatttgaacaatttgattcgtatctttttcgttgatttataaacatcccacaagcttggaatgagagtgcaaggaggctgggagtttgcgatcaaccagcccaatacaagtatgcgacagagaaaagccccaagacttggatttgacatgaaatctgtataaacaattttagtatatcggaatatagtgattttgaatgtgttgttacaaacttacctgccaatagtactgaggcttcagaaatgccgtggatgattatttctacaagtctaacaactattctcgatcatgtacaattcgaaatacctcaagtggaatgtccttagtaggattcctcaaaacaatgatgtccttcacatacaaggacaagacctcgcgtgagtccaagccaacttagaataatcccaagctaggccgacacgattaacatgcatttccactccggtcaattgggattcttacttccaattatatctgcctgtctgtttgcttctgtcgaatctaaatcttcggaacatccaagatcagccttcacatttgaccagctctggaaactcgagaagggcttctgggattcctttctctaccctgcaaatctcaaacagacgcaaggcaatgcatcgactattttcgcatcagacgtgagtttctccagtttctccctctgataataatctgacacattacaggtgcaaggtcgtgtcgacatcacccgcaccttcgacggcgacgagctaaaccgcgaatacatcttcggcctattcgccgatccagagcacgtcagtcttgtcggtgtcccgatcgcatataacatcactcaatttactgcgaacgacaacatcgcatccgcgacaaccgttgtcaccttcaacgcaaccagtttcggcgtccttatcccagtgacgatcgacacatggatcgagttcaacgccgacggcaagatcgcgcagtacgacgcaacatttcgctggtttgagtacctactggacttcttagtcgaaggagtcgcgacaaaaataaacgcgactgagcccgaccaggctgttgcctatgttgctgatttgctagccaccgcgatctgtgatacacatgagcagcattgcacaggttcgaaccagcagtatacagacaccgcaagttgttatgactttttgaccaagactgtgcgatttggaaaggcccacgagctgggtcgtaacacattgctgtgccgcgaggtccatgagcatatggtgcagtaccggcccgatgtgcactgttcacatatcggtcctggtggcggtggatactgtgttgacgatatggactacatgcagactgtactacagagatacttcaatgactcttggattccgtttggctatgggacagatcagaatatctggctcgctgattgatgggagaggcctgctggtaaatgtgggggaaatgatacgaaaatcgcgtcgacaaacccaacgtggtgaatcaaccgagatggactgcgacaacaattatgtcactcttcaggtctgcagtaagccatgatcccgtgtcacaagcaaattgaactcaaggttttcagaaacatgtactcgggtccatgctctatataccatatgtcattagaatcctgcgccagccaaatatagtatcacgatcttctaggagtgtgaccacggggaactgctaccgaactggggtgataacagattttcgcggaccatagtacgggctcacggacatcatataggcatgccattatctgcgccatcttgcgtgctatgtcacatcagacacgagatcattggcgcttttatagccccttgatgataaggcataaaactcctagctcatcctcagcctgacgtggcactgcactacgcggagttgtattgaacaaggggctgtttactgatctgcagatctgcagctcggagctttatgtgtgatatcataggatatacatcggcacaagtctccgacgtctccatcctgatttggcggcgatcatattttacattccaatcccttcgcacgtccgtttctagccgtgtttgatgctgccccagcttacaatcctccgaagagctctctattccctacgtaaagcacgtcagcgtcggccttttaaaaacgttgttttgtttaaagcttcaaagtaggggttgggttcaatatcatactccagcaagtcacattcaccagtgcgttatcataagtacatacactacatcgggatcatctgcccagcccgattgcaaaatcagcgatgtggttactcacaagctaccacccgtgtttgaggtagatacacaagtgtataattcccgctcggccgttgaagttgcatgccagccttattagtctacgtacggaaattccttccgtcacctggctgatctttaccaagcgttctcgccatcccttcgaacgctagacctccttgacatgatcaaacaatgtgaccataacttatggcttaatttagatgcagttaaaatggacacattcaccgttagaacttgcttttttgtctttaacgtccctgtctatccagaccacagaattcaacatcaccaatatggagagaagacgcccttcatgcagcgactcactgcctcgcagtgaagcacagatacgcttgttccccgagaaattcgacgaatcgtccacggacgatagacaaaagttaccacctgtcgacggaggtttccaggcatggatgttcctgatggcttgtgtaatgttggaggctttgatatggggtaagtcagcttgcacgactctaggagatgacagccgactaacatgagcaggatttgcttttgcattcggagtctttcagaaatactatcacgcccatgaagccttccaggactctaacatggtagctgttgttggaacatgtgctacagtgagatcaccaactgcttacgacggtctatgctaacacaatcgacagggaatatcctatttgagctgtccactagtcattattgctatgatccttcttcctcaatggggacgctggttctcatctataggagtgataataatgtgtctttccctagcactgggttcattttcttccaatatcactcacctagtcctctcccaaggagtcggcttcggcatcggcgggtgtatagcatacagtccatccatcctgtacatggacgaatggttcgtccaccgacgaggactcgcgttcggcataacctgggctggctcaggagtatccgggatcatattcccgattgggttagagaagctattgaatcgctacggattcgaaacgactcttagggtcatctccgtggtggtgttcgttctcgctgcaccttttatctactttcacaaaccccggcttccggtcagaaaaacagtcgactatcaacgtctgaacttccgcttccttaccagcaggatattttgcgtctaccaactcggcaacatcatggaggcattggggttcttcttgcccggaatttatctgccgacttatgcccgtagcatcggcgcctcggattttctctcctcgctgaccatcacgcttttgaatctggcgtcggttttcgggagtgttactatgggccatctggcggatcgataccatgctgtcacctgcattaccatctcgactgtcggcagtacactggctgtattcttcctctggggatttgcgacaaccctgcccacattgttcgtcttttcgatcgcatacggtttgtttgcaggctgttactcggcgacatggtcggggataactcacgaggtccgacggatcgacccgtccgccgacgcaaccatcatcttctcggttattgcctttggacgaggaattggaaatgtcgtcagcggccccttgagcgaggctatactcgaggtagatccgtggaagggctccgcagcagcgggctatggcagtggatatgggctgatcatcttgtgtacggggatcagctgcttgttgagcggagtatgtatagtggcgcattatatgagatgtatataggcgggtctcgttgcacatttatgctgatgattaacgtctgcttttggtgggacaaaggatggttaagatcgctacatatgctactgtttcgaactgatgggctgccagtctatcagttattttcttttccctttgagcatgacccctctatgttcaattccaatttattttatgcatagctcgatttatacaaatctcggaaaggcttgggatttccctgaaaagttaaattgcgatatttatagcggtccgccagcatccgggtgcgaaggagtatatcattctactcgccaccatgattgctagacatttccatgccgatattcagggactataatgctagtaggtcgtagatttaagatcagaactagtcatgtaagctttaattctatgcaacagtcaaagttttatcgacgccatcatccaagtcaccggggtcgaccgggtaccctgatgatctcacccactccattttggatcttgaatctccaagcgtcgatctctatactcttttatatcaaaatcatggcccaagcttggcctgctcagtggtcgacgtcatcccacaaggctacggcaatatggattccaccacaccctgctctcacaggttgatattgtggaccatgacgccaatccagaggaaacaaccggttcttcaggaagtatacttcaattaacatactcggaggctgccgcatgcgttgcgggggcgatcatgactctagaagactcggagattgcgcggttttatgggctataagggtatttaactacccatgcacgtagctagtcttctgttcttcacaaaaccttacctagtcactctataagctacctctataagcctcctcttcagagaccagattactccaagcgcaatgcgtctcaacatcgtcagcctcctcctggccggagtcaccgccacctcggccgccactactactgctgccgcaggcgcagcctcaacctgcgtgccctcatcttctgataccactgtcctccaattcgccctaggagtctccaacttcatcggcggctggtacaactcgaccgtgaacagcaccttcggcaacaccaacaacgccacccttctagcttatcagaagatcctcttcggcctggagaaggacaacacgctatccagcgccgccatcgagaaagtcggcgccaaggcccccggcttcaccgcgccccagtgcacctacgttttccccgaggtgaacaccacccagacctgggcacagtgggcctaccgcttcgaagacaccgtcactggtgccttcatcggtcttgccggctattccgactcccccgaggtctccttcctcctggctcgtctggctgctgagcacagcgcgcactctgctttgattggcagccgtgtgaactctacctactttgcccagaacactacttctctggtggcggcttacggcccggctcagatcttgtctactcgtaaccagactggtagccttggcgcgtatctgggtggttgtcttactgcccctactagcccttgtggcacgctgagaatcggacctttggatgctactccctctccttcctcttccggtgtggcgagcaccagcttggctgctgccaagaaggcttagaggtcattggttgaatgaaatatcaaactttgggtttgatggaatgttgcaaaatataggattgtgtattaatttggtcaatttgaggaggaatatcgctgttttaacagaacaggatgaatatatgacatgattaatggattaaatgggaacatgtcatgacactattgttctataactacatctggtttaaatttgttaatagacctcgggaaatcgctcgttgagtctcgagttagacagtcaatcatgatgtcaacgaccattaaaggaccaattgaatataaaccaagtattgtttgtattgcacactcatgaaaaagatacctggtttattacctagaatatttacaatgtcgtaaaagaccccgtctgctgaagattcttaatcctcccaagcaagaactccaactgcctataagccgcgccgggagtgtactgtgggatctcatgaccggcagtatagaccgagctgaaggtcagaccacgctcggtatgggccgttccgagaataccgccaccggaatcagcagtccaaggcgtactccccgccccattagcaatatcatcgagagcagtcgtatacggcacaaacaatggcccgtcaggaggtctctggaatccctgcgctccattccaagtcatattctggattgtagcgagggttccgttggcgaagagcaggtaatcgtaccagccatggccgatgaggacgttattggtgcgctcgatgacgctagggaggggaccgagtgcgctgggaacggaattatcgccgtcgttgaagattcgggggccgcagactgcgtagtttgttggtgggatgttgagggctgcttggacggcggtgctgttgaagtagttgttgggtccgccggctaacgaggggaagcccatttcgtcccagaggaaggggcagaagtctgttaggtggtacatgttgaagcaggggttcacgtagattgctgcttttacgatctcgtcccagacgtcgcagccgggcttgttggggtctggtgcggtcgggaagttcttgggtggggggtaggttagggctgtgtctaagaatttggtgtagccgcatttgtcggcgcggtggttgatttctgtcatgaaggtgtcgttcagtgcgaaaacggaggagtagtggttcagcgctgccactgccggggctattggacatggttagtatgaagatttttgtggtggagcaacaactgaccatagatcataacatcatcatcattaatggaagggtcgttaatctggatgcctttgaggttgaaatgcgtggtatcgttgcggtttaacatcccgtctgccagatacggaatgtattggcccgcatagctctctccagtgaggtaaatcttgtagccctccatgctgaaggttttaatgaagcgctcccagaagtcgttgaattgattcgaaacatcgatctcattttcaaccgtggatggtccgggggaaaagcccgtgctggcaggctggtcgatgtagacgatgttggtcaatttggtccatgagtacgggttgcgcacaggctcgtacactccagattgccataggaagggtccattttcttgtaacaggccgtcaagcgagctgcatcctgggcctccattcagccagatggtgatcttcgagaattagacgaaactctgcgacggattgaaatcacgtacctccttttccgcagctgggttggtagacgggaaaaaccagaagaacaagctcgattctccatgaggcttattcgacaaaagaccggcatagctttcgccgatgtcgaaaggaacttgtgggaagtgagttccgttcacttggaattctagaagaagtggttgtaagtgacagtctcagatcccaccaagacatatttgcacttactttccgtcttgttattcagatactgatgctcagtcaaagcagcgggaagctctcttttgcgcagaccgttcgcaggctttctgaaagatgcagctctgccatgcggattttgtaccgccgtggccacggccaccaacgaagtaaaggctgccaaaatcaacattattcgatgatgctagagaaccagaattgaacccaagagcacggaaatctgcttttataaccccatcgaccctttttcaagacgctgctactcggagcgatttgcgttccgtgcggatattcacgcattaccaagctttgccaatagagatcgtggctagttgagacaagacccgctgtgaggcagacattggtcgctagccagcgggatctgcagcgactgcaacgtcgtcaggaacaaccggcatggcgattaattgcacttccttttactccgacggagtccgttatccagcgtatgatgcagatgcactcgtagctcggcccgctgtccataggaagatatcagtgcatgtgaatgccatgtttactgagctggtacggtcgcggtggggcgagataatagtatctagtatctaggtcttttagtgaaggcatttcataacgtcaaactagatgtcaatcctgctgcctgtactctatacccgcagggtctcaactcggatcaaatcaatttgataccacccgaaggttcatgacacatcctgagatctaccaaggtagataccatcaatgtatatttccatcgcatggataatgggttctattggatatctggtggattttaagatctaggtgagggggagtcagaatgagtactccgcactccgcatgtaatgacatcctaggcagaaaagatcaggcgacaagcaaaccttaggcattcaggcagcaatgtattcaggcaacaaggcatcgaacacattttaactatgacgtcaatttgtgcgttttctcgacagcccaccagatcggctgaagtatgacaccctacatcgagtagcacacatataagctgaaaatatttacctgtaactctgcagcgataacgctgatatgctagacctcggaatgtcgaatgtccctataacagacaagatgaaagctcaatctaatgggagtgcgatcataattgtttcttagtacaaagtgagcagagagaggtgattacctgtttaggaagcggatgtgtggggaagaatccatccaaggttcaaattaagctattaagctcgtgatgatgatatggtgaggtaactgtacattccgcagccctccgctctacgaattaggaaggaacccaagctgtcattattatcaatgtctggggatggaatgggggactcgtgccctgcatctctgtctgtgaggggcatacacccgaccggcacggtgtaacaggtgacattcctcgatcggcggggttgggtatcttttctatatagatctgccatcccagagctagatcgtatacatccagggcaggtggggtaattattcagggtccaggggtttgaagaagctgaaatgggcccttggcctttcatttgttgaattacatacatgattaatccgtatagcattatcaatatcgattaaacaaagttgagtctcccagataatataaccgtaaactcccgaagacaaatgattaacacatgaccttttcccgtatcccaaaattgaaacccaaccgaagcccgaaccccgaatcccaagcccattccgatattacccatcgtcaatccgtgatcatcaattagtcgtcaggtcgtgaattgtcgagacccgtttaatgagtattgcgtcttttcttgagtcgcagactgattttctttcgtagttcagagaacgggttcaccaaaggacgattgtagaagggatcgttcttgaagtcctcatcggtgaatttctggaacggagtcagtcatagtgatacagtaagataggaagatggacataccgtgccagggaggcgcataaagttaccagaaaagtcattcatcatgttcgagccctcttcgtaagagtactcctggccgttgcgatccatggttccaggaggatagaaagccacgccatccaatgggcggtgactgtttagggcatcggcaatcttgtggtgcggagtagcccggagggcctcggcattggattccttgacagcctccagcgggctggactgactgaagcggttgcgctcagggcgggtcgcgtcatacggaccctcgtggtgataggagaaattgctgacattgtccagcctgtcgatgatatcaggctgcacgatcatcgagtggcggttggacttggtggtgcggcgacgatggggagcagaggactcgcgtttgcgtctcggctccaccgggtaatgttcgggtgcgccggagtaccagatagaaggcgtcgagttcagtgactcagaacgcgaccgctgggagtagccagacggtgctggcgacatgaagcgggcatatgggttgttgctgcccatgcttgctcgcacgtttggtcgatcttgattaagttggttgaagtgatgactcgaggccatgggaatgcagtcaactgccatttcgaagttgttcgaagtgtttttatgagatgaagaggtatccaggatgaaaggcgcagggcgcaaatattacccggtgttataagtaagagtaagattactgaatttagaacaggtgaggctgaactgcaatgcaggatagcttgtatagtagctgaggatgtaatagaggaagagtgtaagagaagaagagtgaaatgtatgaagatgggtagatgtagaagggagaagagcgagcggcgcaagaagggcttatatcaaaggaagcagcggacgtgacgtgacgactcgctatacctatgctttaatgatcctcgtggctagacgcagtccaggagcctctgatggggcttagaacctcatttgaattttccgcgactgcatgtaccaattatcactgagaatagaccaccgggtggatcgagatgttaggtttactacttggccgccgattcccgggacgtcgacggagtatggcgttagtgatatcatggtatattgtcccactcaatagtttctactttcgctaaatcaattggagtggattacaattctcctattcgattcgaaaataaatcccatgattcaccatgcagaaagactaaatatatgcaaggcccatgttgcattccacatccgagacttccacgcagtcagtccacttcccgacccctatgacgatatccctggagtactacctccacatacattttcccttatttttcaacgtcatcctgccatctgaagaagaaaagtcaatttagatatcctaagtagtcgtcggatatcttatcccgaagtctccgatgactcgtccatggattaagctcatcactaggggaaatagcgtctaactggtctcacttggcatccgaactacccctggcctggtctagatctagactctatttcctccgtaccttcgttgggaaatttcttcagctatttagcttttcaccgctttttgctccttgctacgattcatgtgcatttcctcgttctacaacatacacgcatacaatctgaacggatgtcttgggatagctactcatgtgtagggacgacgcaactaattttgaaactgctagtgtgtttgatatttgtgtggtggggcgatatcgactccatttctataaatatccagctgaataatataactagagcggtgcacaaataattttcgcatgcataaaagattaggtgatatgtagctggtcttcatataaaggggctatataaggacacagagcagaggaaatgaatacaggccgatgtcgcattgccaccattccaaaggtggaattgaaataataatatcaagagtgttggtcggtgttagttacggttgtggctagtacatagaacacggacattgtagagttttatacttagaatgtcccttcgatctcatttcacagggaatactaaagcaatgttgatcctcagcatctttactaacaccggtagtgctatgtattccagccatatcgcatatcaccttctcaaaatcccccagaaaggggagggcctcgtttaacgaaagacagtcttattcaaggtgagtgcgttttcagaaaggtgacataatattctgactttggtaaagcatgtggcagactgcgtgcccttggagttggccagtctgtcctaattctaatcccacccgaggtcagtcatagcatgcgccgagaaaatgatcttgtgacctcgcttgacgtgattcgatgggcactcatgcaaacttgcgatactctgcaaagcttgaaacctctttgggcctcacaaggcttgcagtattataagaagagcagattgtggggtagtctcattgagggtagtacacctgcccaagatgtcgtttcatgcattcaggaacccgaagcgcaaactttatctcagctttatcatccatcggacgttcctagggcgtcaagtctaaatgagaatatagatccaagtgatctcgtcgtacgtggtatggttctagacggcaaggtaccgacggccaatcatttctagttttatatatggtatccgcttcatgtatcaatttaagactaaagctccttccttcaatcttactcagttactgtcttttgttgaagctctcgccacggttttgaataacatcgaatagaatttgattttgctttatctgaaaattgacttgggcatgtcatatcttatttaactacataatgtgaagcgattggctacaaaggaaatttgactctgtgcagttaaagctcttgtcttcccatgatataatacagttcgaaatcagttccatcgtttacacaaggagacttcgtctcacctacttctaaaacacgctatacccattactactactctatccttatgttaagtgttggtctgggcactagccgggaaacaaagtatgtgtcgggggggtactccgtacagtaatatgttttcgaatgctcttgatcaacaatttgtttgaaggatatacacgaaagccgcgcaaacataatcaggaataacaatcttccacttccgccgtggaattcaaggttcaaggcgacagaacctctgtgatttagtggtgaagctggtttcaatccgtcctgtgaaaggagtgagaaacaaaatgtcttcacaccacgttcagcgcatcttagaaccaaaaggacttacgtgataacctgaaaatttagggggtcggtgctaaaagaacgctggcacaagccccttgacatgtcccaaaagccgaattgcaagcaacaatagaggcaggtgcgctaatacccatagtagctccccaagtaaaacccgctgctgaatagcaagccatgacaaccgcggcacatcctgcttggcataccccgtacgcggcaggtccggcgagcaccgtagggctaaagagtaagagattaagaaattttcctcgtgagactctcatttgttcgggttcgaatcgggtttgaacggtgaaatagcgcctgaacctggggatgcaatacgaaaggaagcagatggattggtatatgtaccataccaagagaatgacatataatattttgctggcacaatggctattgaatgaagctcgattactggtgattggtctctatattgtaggcctatcataaaatttaacgtaccgctgtttccgagaaaaagataaattagttactcacaacgtagatacttatactgcatctgatacatcatatgcaaggagaattgaagactcacattcccttcttgcccgacacggactacctacttacgaataacacacccctgcccatatacgaggatttgataacatagaagtctcctgagatgatgatagtgagccgctttagtccaaaggcaatgttccaagtccactattggcgccttgatatttacagtgtattaaggtatcattaagttgctttcaagtggtagccgtttcgaacatggctgtgcagcggctcaaagctctcgctttcattttgtgaaacctgttcatgaagcgtacattggtgaatctccacgttactaaatccgtacgttgctgaatccgcacaaagatcttaggcaataattatgacataatgtgagaatagaaagaaagaatatatgacaaatgaaagagaagtgccaatatcaaaaactgaaatttatagatgaaattgaaaacggtgattggtcgcctacttgaaattgccccacatctgagaaatcagacctccatcaacacaacaactctcctgtcacatcggatgagatgtccctagtacagtattctgattcggaatccgactcagaatctagatcttctcttcgcccggccaaaaaaccttgccgcaacatcaatcaaggtccatcgctgccgcccctacctgcatcattccatagcctctatgcctcgagcacacgtgtgagtgtgcaagatgatcccagcctccatggcggccgaaaacgcataattcctcacgtagaaggaaactggccaacacatctttacctcgaatgtgagtactgagcgctggtgtaatgccacttgtacaaggagctaactttgatagggtacccggggaaagatgagctgtcgctccttgcagatgtcatctctcagtctggatatgtggcagaggaaaaggcacccgtagtgcacagtcttctccacagcgatctcggtgcccagttaccccttcatatcagcctgtctcggccagtgattcttcgcactgagcagcgtgccttgttcactgaggcgctagaaaaggctattcatgcctcgcatgttctatcgtatgtggccaacttacaattcttgatcatccgctaatactttgaatagatttcatgtccaaccagatactttatattggtcatccaattatgaaaagacacgttggtttctcgtcttgggcgtgcggagaccgagccatgatggtctgaaccgcctcctgaagatgtcaaacgagactctcgctcgcttcgggcagccgccactttatgcaacctcttcgactcaagagcaacagaccagtgcatccctccgtgataggagcagcagtcaggagcgcgaggatttctcagggtgcttccatatctcacttgcttggcgtctgtcagagcctagtccgaaggaatccgaactggtagccaagatagatttgcaaactttgcgggagatccaggttagattcgattgtgttaaagcaaagattgggaatattgtcagtagcataccattaggaaaagggataaaatgaggttctctttcagtaaattgggcgttgtctcttcaagaacatccaaattcgaaaattattacctatgcatcttgcttcagtgctccagatcctctcttaaatcatcgaaagtgagacaaagtagtcgctgcctcctatatttacatacaccttggtattggtaattacggtaatattacccacatgatcgcgtcttcccgcgacaactcccttctttctcatcaacaccaccatgcaggtcccaagtgtaactctggtaagcttctccatcatctgtgatcaaatgttttctaacctctctttcttctaggatgacctcaaagccttccaatttaagcacttccctgggcaacagctggctgtgtttccccaagaaaatgaccagaccacagacgacgatctcggatactatccagacggagtgaagcgtacgctcacagatgagcagattcggatcttcagacacagtgaagttcatgctcttctgcgagcgaggcagctccagaacgatgaggcgcaataccaagctcggatgcagtcatctatagatgatggatcaaagggtaaactagatactgtacctgaaaagcgacctctcgacacagaatctcagatgcaaggcggtgatcagaagcggctgcagtcccagaaggggtctaagcaacacaccccagaagacacgtcttctaagctggactacggggatgactctgatcaaacacaaatggcaaagccaccggtgtcacagacgccataccaaggtcgcaggattatctcctacaatgactgatctcctggttgagtatccggaagcccctatattcaatctaatggacaaacccgaatgcctacacttcccactgcactgacaagccggtaagttatccacattctattccactacacccttgcccgttcatgatgaatacatcgtatcatccttagccggaaagccataccatctgcggatgtgtgaggcattggcgaccttaatcttctctctgagggcttcttcatacctttcaatcacatgcacatatgtttatttgcgattctaacggcttatcagttatggtactttatgtgggtgcttttgacaaagagtttcacttttcgcatccgtccaaaggaccgccggccaaccatccagaacaatgctctcaacagtctcttcctatcattggatgttccgagcgatataactacaagacacattctgctggccctggggtttagatggtttgacacctgcttggtctcgacgatactatccaaaaaatgagcgactcgccatccttgtcagtcgatcaactcactggtacactgtacagctaacctccatctggaattcgggttgccgacggcgtaatcttgctatcctttgaatgcgtgaaatccttgaatatctgatcatctggcttcgggggctctctcttttggtctcgttgaagattgatttcagaaccgtcagtgtcgtcacaaaatgagcaagcttcatcatatgtgcttacagtgccttgaactagcagactgttagcagtgagcgtaacacgagccccgatcttcggcttatccgataatcaagaccgacttcaaaatgaaattttgactgagctaccatctttcatgcaaatcctacaacgtaatattcttagcagagcgtgctcgcagccatggcccatcccagggacaaaatatattgtcacaggcagcctctcatcactactcgcttctcatctccactcagacgaagttcgcaactgaaaggatctgaaaattccatgctggattcccacattcgataatcgaactgtttagagacaccgaggatcaaaaccaggtgccccgattgacccccagcagagaagacaaaccgagcctttcccttccccaaccttctaaggtgcctgcaacacatacaccctccatattttactccttcggcagtgccacctggctccgttccacctcgcaacaacagaatcaacaaagcgttcacagaatatgaaatacgaatcactatacccatagcagcaatcctctgcccgccaacaagcacagactaccacgtctgcgcaatcccaaccctgttccaagcttcagccgggtcggtatgctcccacacaagactgcggttatataacgcacattcgcgaacgcatgcttgactgaaataaacttgtaacctatgtctgcttgatcgcctgcgcgagttcagccttataactgctacagggtcagaaactaaaactatgtattattatattagttcacctctatctccaaacaccactatagtgtgtgtatgaaacaagtatccaaggcaaagccaactcaagcagcaactcgagatcgaaacaaggtatcgaaagtgtcaaaacagatgccccagatgcaaaaccagaacgccagaaaccccttcccagatacacttttatataaaccaggctaacccaacagaaaacgcatgcagctaagcattattcccacaagaaaagctctcactgctagggttatcatggagagctttgcccgagacccaaagaccaagaccgcacaacgcagcaccaacagaaataacaacgatattcaacaaagtgagggcaatcttcctcggcgacgagaaccacagacccttattcataaacaaccaaaagatcccactcaagccatacgtaaaccaactagcaaagagcgccgtgatcaagctgagcaggttactaaacacgggaatcgcagcggaaataatccacgccatggtccacagcgcaagcgcaataccgacccacgagcccgtagcgatccagtcacgcttgtgcatgcggtccgtaccctcgaaaacacgcaggtagacatacttgaacgcgacgtggccgttgatgacaccggcgatgatgatagtcggcagcgagatgccgtacgcgattttcgcgaccatcggcgaggcggagcccagcgctggcgaagtcacgtcgtcgccggcgtaccggtagattactaacgcggcggtgatgtacaggcccatgtcgatgccttgcaggagacagagggattttgtgaagtcttttgggttcctgagctcggccattaggccgaagaaggccgcgtggccgcagaaagcgaagacgatattgcagactgctgagaagccgtggtagaggtttgtgtcgacgactgcgacaactccctgtccgggtgctgtgatgccgacggcgatcatgacaattatgactgatgtcatgatgcttacgaatgctgggattgttaattgggttctcaatggggtgtatggaaacgtacaaacgatggatagccatgacatcttttccagagtgcgaggtaacgagcagatgaatgagatgaccatgccaacgatgccaaagacgatggagcaggtgccgtggtttgtgatggtgttcatggcaacggtgaaggtcaacaggtggctggccatgataaagatgaagaacacgatctgtgcagcgccgaggaattcccgtccccatttccctgctataacctcaccggcgtctgcaaacgtgcagatgtgtggatatctccatttcatctgaccgatcacatagccggtgtatgtggccattaaacctaggaagaccaagacgaggatcgctctggatatgattagcttcaattcctgcacttgaggcagaaggtatgcttacggaagtagtcccagagctgccacagcggcgggcagtgagagcacacccagtgataccgtttcagcaaccatcactaatagaatgttagattagggttggtttgatatagcatattatcacatacgcagaccacattgcctaacaagatatacgttaataacagagctaccacttcgagctatgaaacataccaccacctgagtactttgtacttgacctccgcgaactcctcgtcgccaaaggcatcttgtctgactttcgggacctcaaacttctccggatcagacatcaagtccgcgggatttatatagggactcttctcattggaatcgaaatccaatgcagaatgcgaggggctcatagcgcagatatcaaaactagcgagtataccagtatacccgggaagtagatatcacgtcaggaaccgaacaaaaagcgacgaacaaaaccgaatcgcttgatacaccaaatccaaagagagagtaagatcttaacgaaagggaaatggtattaaaaactcgaattcacaggaaaagcacccgccaagtcagtaaattgaacaataaagaatccgccacacgaaactgatgtggatcgccgacctgcggaccgcgacgacgaatcacctcgtcgagacgtaatggaaaagccgaaaaggacttggtctgctggattcgagtgagaaattacactggtgaaaattggaggaaagaaaacttcgctccgatgccggcctcctgtgcgaggttggacctggctgttctacaggagttcaggtctgcgagggtgaaaatttctataggaggtctaaattagaggcgactacttttggccctgcagatttgggaactccatctgataagcttatttatgtctgtctacggggtagcctatagggatgaacttgcacgatgtcgtgctcacgccttttgccttaaattgcacgacgcgttcggatatagatcgggtcggagttggtcgctagttccggtttcttttgatgaaccacacgatcttataaggatatatgggtcaactattcttgttttcattgaatacagctatgctttcatgggtttctcatataagctcgcatctgtcttcttcatcaggttcaactctgtcgacacatcctattaacagaaagttgatctcaacgcatatcccaaggccgctttgaaattccgatgcgagggctttgtatgagcccgacgtaacggcgacatcacacaagagaacccctagcatgtaatactggacgtagatagataaaaggtaggccgaccgcccaggatgccttcatggttgcaatctaccatgtagtcaattttgcccatgccgtttcagttcaaccagtagtgcttctcttcaggtggcatatatagcagcctcacaagaccccagcagatgaataaagccactttcaacggctttattttctcttcgagcttcggacggctccgtctgaaaagagcctccacagggagacgcttgcgtgttctttatcgatgtcgttaattgctacctccaaggcacaggaaacagcaaatagttgtaggtgctcaccctgtgggatgaaggtagaccgactcgccagctgtggggtgttttcgcttgcgactgggcttgcgactgggcttgcttttgacctggacatggtgctgggagagtcgtctttagtcaaactcctgtgcgcaggattgaataggacttgtcatgaagattctccggtggttgaatatcatattcacctcattagatttcctagttaaaagtaaggggaaggatgattagctgtgattcggaagttatgacttcgctagattcaccattgttgtctgctgagatatctgatgtagaatctggtttagatttttagattcgatcatataggctctgcgattcaccttggttgctagcgcaatgctcgtattcactctctgagtctggcgagatgcgcacatcacagcgtggtatagtgaggaagaagcgagatataagaactgtgatatataaggaagatagatataggagagcagatatagggaagacagatataaggaaagttaagagatagacgatccagggagaaggcatctggctatataccgagaagttgtttgtcaaagacaacaaacacatgtggcatttgttcagggaaggtgcaatggagagtgtcgcgctttaggaaggcacatgggttcggggtataaaaggagccctccccccatttctcctcttctctttttcttctcctctccccatccctttgaccaccatctcaccgtagccccccgagacagcgcaggcagagggtctcgtagcacatgctgcttcacctaccacagggaccatgacattaccatatgcatgaggtccttgtaggtctgcatcaaacaacaaactggtctttctcgtggacgttcctgaagtcgtggctctcattgccatttgacgagtcctacggaatacatgaggggtgtaaatcttcgtagccggttctctttgtcaactggctatgtatcaatatcaggaaagcaactgacttcttgttcttctttcattcaatcttactcacattcatttgcacaagccacttatacggcaatcattcaagtcccgctatggcacctgacatctcgaactcctgcctcgctgagcttgctgtccagaatttcctagaaagaagctacccaacacactgaagagtcaggatcacctcctgcctgagatctcaaagacggctacaccaagtcatgtctcctcatcggactacgcaatcaattcttcatctccttctatgctgagcatggacgaatgttcatcaaacccatttacacacactggtaacaccgattccagataacatatccatccaattgtcaagattgaccatgaattaactaatgcacctgtacataaatgaaatatggaccttatgtagttagccaaacctatccaggaatgaatcccatccatccatccaccaccaacgccggcggactttccagtccggaaatgacaagcaaaacgaaaaacaccatgctagtaaaaatgctatacaacaaaaaatgtacaaaaagaaaaccatatgtttcatgcaccatgtcaccccaaactccgccgtttaagtctccgcctcttccgctgcgactgctgaatagaatcctcgttcaggatatccggcggcagctcgaagtcctgttcgcccaggtcagggaccggatatccgaatgcgagggttgagcgggatccgccgcggcgtgtgccttttgttgcggcgatggctgcttcgcgcacatgtcgttggcggaagaaggatgtgaatgggctgtcttgtggagctgggttccagaagtgggagagggagggttgttggagccgtatggatttttgggttgagataggagctgggtgaggtttagtgggtgttgggttgggctttttgcgtttggggctggggtttggttcggagttgttggtgttggtgttggtgctgggaggaggtttggtgatagacttgcgagtagcgggcgctgtcttgcgccgtttagctgcgctcgctgagcgagcttcttggtgaagctgacgcgcagccaaagcgtcgacatcgcttgggtctgggtctggctctgcgtctgcgtccggcgtgccggtccccggggccggtgagctgtccacgggacgagatcgtttgcgcgagtgctgttgcgaggtattgggtgttgcctcggtgcctggcaccgggagtgccttttccctttccagtttgcgacggcgctcttcgtctttccatgcttggaacttgttgaccagagtgactagctcctggattaggatatcgcgcttcggctcgtagagcttcttgtcgctttcgtggactcccgtcaggcccatcatgcgtagccagtcctggccgcgtagctcgtccaggagacgctctaggacttgctgttcatgttgggcgcggttgcgctcgatgttgcggagttgtttctcttgtcgttcgaacttgcggtgtgcgcggaaataggtctcttcgctcagcgggtcgactgcgggtgtgcctgatgcgggtttgggatgtttggggcggatcttttcacagtcgtagagcttgagtagcgggttgccaaagggtgtaggctccgggttagagcagaatggtagtggtcgcgggaggtcgtccacgagagtgatagttgttttggcagcaaggaattctatagtaaccaatatcagccatgcgctcgatccattcaggtcgagcaacttaccaggttcgggcacatccaagctgataatctgttcgtagttgtggaaatactgcgcaagctcgctcttgcaccgtgacccggtattggtcgaacgcaacgaccgtctctccgaccgtgtatccgatgcaggctcgccgtcgctcctgtcccgcgtcgggggcacccccacagcaccctctgccttgatcgcgctctcgtcgacgtcatccagcgatcgattgtcattccgatgagtcgtgcgagcaggcgaaaccgttggcttgctattcgcgtccccaatcgcaggggtcagggtgcgctgcttcgcgaccgacggggctggcgagatcgtgtccaatgggtctggcgactcgtgcacgccgcgcaaaaaatcggcgccggaggaggttccctgatcgcggcgggcgcgtggggtcctgtaaatgccattgccattgccattcccatttgcacatgccggggtcgccaattgcccggaggcgaccgtgtccaccgacagagaggagttgcgacgagtccgattggaggtgcgcgggcgcgagggtttcaaggggttggaacggggtcttgcgatgggatctttgatgtcgagacagtcgggggagctcttacggtcggagccatttgggatgcgcgatttcttcagaccgtcggcaggatcgggggcccgtcgcacagagcggagggaagaccgcgacaggagggccattttggatgatgatcagttcatttgcattcagggggagtcccccgagggtttacagggatttagggatgaaatatgggcatgcgagaagttcttggcgaatgccgatggaggttgtcaaggtggtttatatggacttcttggaggcgtcaacgatatattgattctgattctcttcagagatagacaatgcattgtattcattctattgttctattcagaattaattaattcagctgttgagatatatagaatggcgcttccaatgggcacctacataggtaacactccattcttgctacaggtattatcctgagataggttctcattgttaattatctctatgttcaatgcaaaatagtcaactattcaactattcaactctcgctatcccaactatctcggaaaagggcaaacccccacgggccctcagtgtgggggacggcaattcaaccattgccaggtcggaattgtaatatttctatacatgaggggtgagaggggatattgggatattggatataagtctagtaatagacagtagcactgggcagtagacacttacaggagtagattcaggatatcagatagacaacctagatatccccagtttacccctaagaggagaggggatatactctcctatacactccaacgcatcatcgacggaaatcaaccccgcaggcgtggggggaaatgtccgaatgaaaccaaaagcagacgtgggggataagactatccagctaaatagctgtaggttcgccgatattgatccccatccctaagtgacatttggtatgcagcgaatgagtccatgaaacctacacgtcctgacagaccaatagacgacctcttctccaaaatgaccgccaccaagctaaatgccctcccccacggtgtctacgtccccaccgtagcattcttcaagcccgacgaagaagtcgacctcgcaacggtcgagaagcacgccgtctatctcgcccgcagcggggtaaccggcctagtaacccaaggcagcaatggcgaagccatccatctagaccgtgaagagcgcaaggccatcacagccgccactcgcggcgccctcaacgcagccggctacagcagcatgccagtgatcgccggcgccggcgccgcctcaacccgcgaaaccatccgcttatgccaggactccggtgcagcaggcgccgacgcggtcctggtcctcccacccagctactacaagacactcgtgagcaccgagtccatgcacgcgcacttccgcgccgtggccgatgcctcgccggtccctgtgctcatctacaacttccccgccgtgcagtccggcctcgatctcagctccgacgatatcctgacgctcgcagaacaccccaacatcatcgggtgcaagttcacgtgcggcaacacgggcaagctggctcgtgttgcggcggccaagcctgatttcttgacttttggtggctcggccgatttcacgctgcagacgctgattgccggtggggcggggattattggtggcattgctaatctgattcctcgctcgtgtgtgcgtgtgatggagttgtattgtgctgggaaggttcaggaggcgcagaaggtgcaggcggttgttgcgcgtgccgactggactgctatccaagggggctttatcgcggttaagactggtctgcaatgttaccgtgggtatggtggtcttcctcgacgaccttgtgtcgtgcctgatgcgaaggctgtggcggccattcaggaggagttccgggaagccatggagttggagaagtcgttggagacagtatagatgaattaaatcatgataccagatgctatacggatattctgttctttccagttagttcaagataatcgtaaataaacacagtgcgactgtatcatccatagctcctccccctcttttaatatcagatgaagttgcatgtgaaggttgcactgtctcctcttctttgcttctaatcatctccgtttgatgtaacaggagataactgtttgtttttccgatctcgatctccaggttgcatcaagaatgccaatgtgagatcggcaatgcagcacataaataggtctggctacctcatagccacggtctttctgtttatcatcatcactcgactcctcatcatgaagttcgcctctgtcctgactgtgctcggggccttgtcggtttccgccgtccaggtgaatccacttcccgccccccgtaacatcacctggggttcctccggtccaatccaagtcaaccacttgaatttgaacgcccatcactcctctgtggtctctcaagcttgggagcgagcatgggagactatcaccaccctgcaatgggtccccgccgctgtcgaggccccgattccctcctacccagccttcccttcgacccctgtctccaaggccaaacgcgcgccctccgcggtccacaacgtcaatgtccatgtggtggacagcgatgccgatctccaacacggcgtggatgaatcctatacactggtggtggccaagggcggcatccagatcaatgcgcagacggtatggggtgtgttgcacgcgttcaccaccctgcagcaaattgtcatctcagatggcaagggcggcttgatcattgaacagccggtcgagatcaaggatgccccgctgtacccctaccgtggcatcatggtagacaccggtcgcaacttcatcaccgttcgcaagatcttcgagcagatcgacggtatggccctgtccaagcttaatgtccttcactggcacttggacgatgcgcagtcatggcccatgcagatgagctcctaccccgagatgaccaaagatgcctactcgactcgcgaaatctacaccgagaaagacatccgccgcgtgattgcctacgcccgcgcccgaggtgtccgtgtcatccccgaggtcgacatgcccggccactctgcttcaggctggcagcaggtcgacccggagatcgtggcgtgtgccaacagctggtggtcgaatgatgtgtgggcggagcacacggcggtcgagccgaaccctggccagctcgatatcatctatcccaagacctacgaagtggtcaagaatgtgtaccacgaattgtcgcgtatcttcgacgacaacttcttccacgttggtgctgatgagatccagcctaactgctacaacttcagcactcacatcaccaagtggtttgccgaggatccttcgcgcacctacagggaccttacccagtactgggtcgaccactccatgcctatcttccgtagtgtcggtgagcaccgtcgcctcatgatgtgggaggacattttcctcgcgaccgagagcgcgcacaacgtgtccaaagacatcgtcatgcagacttggaacaacggcattgacaatatcaagaagctcacctcggccggctacgacgtggtcgtctcgtcctccgatttcctctacctcgactgcggccacggcggcgctatcaccaacgacccccgctacaacgagcagagcaacactgacggcggcgtgaccttcaactacggcggcgccggtggctcctggtgcgccccctataagacctggcagcgtatctacgactacgatttcctcacgaacctcactgccaccgaagcgaagcacgttatcggtgccgaggctcctttgtggtcggagcaaatcgacgatgtgaccatctccagcgggttctggcctcgcgccgctgctcttggtgagctcgtctggtctggtaatcgtgacgcagcgggcaaaaagcgcaccaccaaccttacccagcgtctgctgaacttccgtgaatacctggttgccaacggtgtgatggctactgctcttgtgccgaagtattgtctgcagcaccctcatgcttgcgacttttataagaaccagactataatctcttaattgctttgagttggacttagcgaacttatactgtctggtctgtatatacttggtcttctatacccaataccattggaattcttcatacagtctactatttgatatgtagttattgtaacaaccaacccacaacaccaacagctcctatacctacctcctacccaatcccaaccccaatcaggcaccaaagcctcctccagcccaaatcaaattctacccccaaccccaattctcctccatattcaccttaacccaaacaaagccaacctaaaacaaaacaaccaaaacatcacaaggccatccaccgatcagaccctcacagaaccccacagaccctctccccttcccaacccacccaactaacctccacaccaaaccaagtcaaaaccgccgtacaacctccctcttggaacttggaactcacccttcgcccccgtcccggactagatggcctcgggaggggcttgctggtgcagtatgcgtgtaggatggagtactctgtaggtataagttaggtgcaagcatgttgcatgcagtcggatatcgcatgatatcattagcattgctatgtattgatcattctacatccacatattgtatatagtatgaatctacataaatgtacacataggtacaagttcgacgtcaatgttatatacatctgtattcatacatctttccatgtatacgatccataccgcaccggaaaaaaccatccatccaagcataccataccatccatgctcaatccaaactcgaaacccagtctacggattcgattcagactgggctgggctgcgcgggggttgctcacgtgtgcacgtatatgcagatgcagaaaggaacatatgttgcacggggatttagctgggaatgacaaattgacggattggggagatataggcgagcggttggatggttattgcttgctggttggggttcgtcatacacgtggaatttggggttatttgtcatttctgggacgggggtaggaggtttgggatggatgaatggtaatgatgctgataccttcctatttgggaatgggatttgcattcttcttaccctgtatgtatctatgtatgacccggagatattcggtacatgtacatccctggcctctacgtatgtgtttatataagtatgtaccgatgcttccatttccggttcgctgtgcccgagtagatcgggaactgatctcgcatattctagttacgtgacgttgcgaaataagagtaactggttggtaagtataactcctgcttggtttggtttacggcttacgtcttacctggcgtggattgaggtgagatatatttctgtatcacagtcgtgtttcaacgtggatcggggtcttttcttcttatattcccttggcttatgtttcatgcgattgtgcggcttcgaataatgcatgtctagcatatcatatggcgttaatgactggggcgttgatggggctaggtttgaggttactcttgcaacatatatcaaaccgaatggtcgaaaatatacatcgacgtaacaaaaaacaggaattcattcgttggccatcaaatttctaaatttctaatacgtcttaatcttactctgactcctatctcatctcacctcgttaccgtttcacagcataaccccaagaaccatagtctgatcgcagcgtggaccacgaccaaatagaaggtctcgtgttgagcgataaacctggaactgtctttctgacagggctgcggagaatttgcggcattttgcatcgacagggtcatccctggtctgctggatgtgtttcattatatcccggtcggttctgacgtgcgtatgtatgtattactggtaaggcttgcaggggctgtgtcgacatttgcatggaagtccttctagaaatcgactttgttgttggacgtacatgtgttcggcatgtctatatgagtttcggcgaatgatatctcgcgattccgaatctggatatgtcaggcatgtttgagatccaaattggaagtctgtgccgaagagaatggagactatccatattgcgtactaatgccgttaatcctcaatatccgacttaggatgagttcaagaatatgggcaatccctgtaggttgcgaggtatacatcgcataaaaccacataagcagcggaccgagctcagaccgatgatcccccacacatcccacgctttacactccagtatgtactccgtagatgtgcctgcgatgtacgccacatgtcaatcccagggttatcataggagtacctgaccgcgtcaatatatctatccaatctctcgggcaaagtaaagcaccccgcagcacgccatcacccgatacatctacatctgccgagctatctgatcaccgaactatagaacctaatcccaaccgaaaacctgatcgacagcacacgatgcaggatatacacccgggtagtaggtccgaccttaccagatcgaccacttaggagttcgtcctaccacacccactccctcgcgtgtcccatcccgcgcgggctctgatcaatggaacccgggttcctatctatcgcgccttgtttttgtaattctttttttggccgggcatgcagacgacccacacgcggggatgcgaataggaaaagactgattccttttcctgtcagttacgtcggggcgcgtgacttccggatcggataaattaattgtggatgcgggtcgcatccatatgccgtgttacccagacgtcattgtagcaccgcctcactgagtggagttggggatctttgcgtcattttcggggagaggaaacacgctcccccataggctgaggagtgtggctggtgtgtggatggtgagtggctggtgatatggggtgggtgtggcttgcgtttcgcttctttcggcttgtttttgtttttcttttctgtggcgcagttgcgagtcccttggtacggtaaatacgtgtaaacagaggtaaagccacaataggcaaaagaaaaatactgtgtagtggagatccgatccacatagttgtcgctagtgaattttcaatctaaatcgcagttcgcttcgctttttgctcgggatcggcacgccaagtcagatccaaggtgacagagcaaaatgggtggaggtgtgatatcaatatcgtcaatcgggatttggcacggaattgatctctagttcccgagatcccgtgcaggtcgatcatcagtgtaggaatatgtatcaggatgatttcatgatgcatgcgccgaccgtatacagcacgagcctctttcctattcggtcgtgtcaaatttgacaggacttgattagcgtactgtggcttgactagtcctttcgcgcctcgctttcatctacaatatattgtctatcacccgcgatgcccgggcggaagagtggctccaggtacagaaatgaacagcgcatgtccgtcatgcaggaagatcaccgcgggaccccccagtaattgaagacactatcaatctatctcgacttgctacacttcccaaatgcatctgcctcggctacagtggcacagtgtaactccttgctcgagtttatcacggggctgagtccacatttcccgctttggtcggctgtgacacacccagatatcagatcagatgatgcgatccagctccaatctaaagaaccaccccatattgagtccgtgggcagatcatccagtccatggaaattcaaaccgaggggcgtggcagatatcgtatgaccgagaagtgattggactaccgcgtacgatgcacatacaacgcaactgcaagataacaaagggccagattatttgatctacgctatcaaatactggaaactagttcccaggccctgaatcagggccggtgagtagctgactctagattctactgggattaatagcttcccctctctgaaagttaatcttgcattgctcgtgtcggagtggcaaacggggtgattgggtgagttttacccctctcgggtgaacaccccagaaacagaatccatgaacacgtagatcagagcccgggtgaactactgatctggcatttggagacgagcaatgaatcaggataaggtatgtaggacgaatgacttcaatgtaagagcaagagcaagagctagagccgcacttttccgtatggaactgataaatcaagaattcacgcggaactcacgcgagcagttactgagattaaggacacccctgtcctactcgcatttaaccttatttagcaatatgccaagcatcctaattagggacatatacctagtacactctaggtaaactaccgacggtacctaggtaagtgtatttgcatttaccctttacatacttcctaaatgaatgatatagtcccacatggactgatctgtcccaaccacatggaaccgtggagaggatcggaccgcgttcatggtactgcagcttacctttccttgcctatgaatgaaccaatagaatactttcgctatggtgtcccacggtggtaagacaggcaaggatatccccttcaagaaataagatatgtgcaaactgtatcacagagtagtttcattcttatgcaggggctcgcttatgaaccttgtcgccctattttgcaggtgcataggtagattatcacataggaaaagagatcaggaccagttaccgtttacatgcacgaggttggcataatgatatatcatcttttcactcccaatgtcttgatagagatgatctactgacaccaacatgtatccgtcccaatggggagcgtggacacgctccacccaccctccgatccacgtccacctgcattacataggcgagtccagtcagatcgcaggaagtagctgccgggcagttcactcgtgcatcctagtgcctatacgaggcttggaggcttggggcggccccgctttcctatttgacgagatgaccggacaacgcacaacgcacaacgcaggatagtgtcaggggaaatggggctcctcgtgcgctggcctccactctgatatctccacttagcttaaggacaagctggggtgatgttggtgctagtatgatagtgattccggcgcggggaggttagttttgatgaggctgtatttcaggcacgggaagacgagcatgtggatatgacagatctgaagcagtcgttgggtcgaaggattctgaaggagcgtgtataggtctagatcttgggatcgtcggcgtcgctgttggaagctgcatttactattacattgttatgcttggaagtactggatctaggcccgacgaaggatcacaggagtagattgaatttgaaaattgggaaatcaatggcattgttgtgtattgttttgatcgggtagggtacggtcgaggctattctgttgtgtaacttagaagctttctgctattatagaagccttattatgtagacagggcttaccctgtatataataagtgtgctaatttcgtcgcgcgcggttgagagacacaaatatcgcttcttgaaacggctaagtcccggccgaatgagctatccgactcgattgatattatgttaaagttggtaattggaattggaaatgtcaagcgtgcattggacggtcggtaggaattgctgtctttggccgtataacagcgctaaatgacagatggggctggttgtacgggcgtcggaagaagatacagaaataagctacgaagcgcttattataaccccaaaggagtcagtaatatttggggtctgaaatatccacaatatagcattataatcaattgaggaaggaggataggaataagcgtggatgtggtatggcaagttcagagttcgtacgactcggcggactaaaggaaccatgaaccatgaaccatgtcgaccagtttcccaactctagagatagatgtaaccatctggatctttagtctagtctagtccttatccctacaccagactgggttgtcgatgcatacaatattgtcgacgttgatcttctccccctccggctgtttcacttctgtttttagaaacaccacgcgcttgacagggattaaacgttcccccaccccatgtgctcggtcctcctatagggtttagggccatacaactccgaatagcataagaggctcaatgttgggatcggcggttgttttcagcgtacagcgtaaaatatagatgaggattttcggtttttgtttttactacgtgtgggatgtctcgcatcgaagttggtttattcgcggactttattttatttcggtaataccgcaaaactggaggaatacgaaggtctggggatggaatttgccactctggagaccgtcgctggccccagggtgatccgagcacgaatgacatcaaagtaaatattgtcgttcgaagtataatataacgttatagacgaaagttgaaagttccatggttctatctgagtcaaccgtggacagacagtactcggactagattgtcttgttttgatatttccaagttggcaccgatttcccgtattgggtatctctttccgacattttgggaggaccgcgttaaggctaggctaactaagagcctcttgatcgtcgtatttttaatctggatatgcaagtccataggaagtctcggggtcgccggatcggcctcccttcggcatataaattatctcagtaactagttggggccaataatataccattaataatctctacgcagtcggatctctggcccgacgccgggatgacagatgagtggagaatcattctatcctcaaacgatagaagagcctagaatgtcagattcaaatgcttgagttacgtttcagcgtttcagtgaaatggaaatatccaccatgttgggggccaaaagtgtgagagcgagagcgagttcagggccattgggtccagtagatacctcgatctcacgcatgaaggagcgataatctcagtcaatgggtacttcttggtactgactggctaatgcgcctgaggacgttttaggtatatgtttgacatggacgttgaaatcagtctaacagttatagttacatactatgcatatgatatatctttgaataacaatcaaagaattatggctaatagtaagcgtctgcacctaacccattgcccgggtatgtacatgtgtcaagtgcaaggcaaatgcacgtatgttatgttgtatgccgaccgcagtgtaggctaagcaaggcaaagaatcggtcaaatcaacacaggccagatatgacttcattactccagtctcgcatcaaaatttagactgtgcatatgactaagggtggataggatagccccattaaaaaaggggatgttaccaccgggatcgccgataaatacaacatacgaactccccgccagcgctgtaatttatccagctgcgcctcaattcagggatgtggatcgactgccccatgttgtttggctacggacgaatcgcatgaacgccttcgctcgcttatgattgggactcactcacgccggtctgttgtggcttgggcatatgtggcgctagttggctttagtgcatcggcccctaacacggacactccgagtgacagctcgcactgttatcccttgggctagctagggctatggcgtaattagtgtagatgatctggatctagatgatctaagatgctgtcatcggaaatgcggagagtagggccgagattgggttccttcgtcttgtatatcaccatggtggtgttcggtatataataaacccagggatcttgatggattgagggattggatcgtacagattaacctgcatccgaatctcggactgaaaaatgggaaatgtcactatatcaccgtgcatccgagaaaatattaattgaggttctttccattttgggtagacccaccattgggttcttcggatatgcaacctggtgatcagatcatcaaggggtgtacagatcatctatacatataaacccatgccgtcgacagattgacactacagtactcaaggaggtgacacctagttagttacttcctccaggttaatgacgtaaaaggcaaccaggggaccttggaagcaggccacatcgcgatcaccaaagaatgcggctcttgaacggcagcctcggaaatcagaggacaacacacactgtaggatcgcctttcgtgattaccgagaaggactagtgggcgggactgatacgaactcacccgacgctaaggaagcccaccgagccctcggagagcctttcagatgtctgattggagagaatttagcaagccctcattttcctgttcgttgggttggcacatatggaccaatcacccttccgggcacgcggtcggcctgccaagttatggaggagatggggccccgtcacggatcgaccgaacttatgggatccgattgtatttgtacaagtatgtgtacaacataactatgtgttcttctaacatgccttatattccccttccttctcatagaaaaggagaaggcaccagatctgagtctattgcattgtctgcttatcttagtttatctgaaaagaattccgtccgctctttctctgggtcagattttggtgcaaaagagtggaacgggtacggagtctgactctgactgccgagatacgaagtatggagtagaggatagacagatgtagatccactgatccattgcatggaagctaggtcaaaagtagtctaggcctatatacaatgtcgaagagaggttaaaaatgtatttttggggaaaaggggccatggcgccaagcctcggggcagctctactttgcagaacggagatgccgatgacgacagggtaaacgattaatcatataggtaacatttgagtatataggtggctcctagaacccgaggtggctcttggtgcaacggtcaactttctgacaggagcttctcctatcgtcaaaagtataatttgaagaggactactccgtcgcagctgtgctcgatgcgccatcgatcggtttccacgaacccgatggacgatcgcctcggtgaaagtacttttgaaaaactaatattccggagataattatggagataattccgggataaatactccgtattcggggatatattcggggatcatatgtaccccgtagggcagagtgaggcaagagtggataaagccagacgagctgtcagaacccagaaggtactaaccatgcggagacagtgggttatattgactgttgacagcatagacatgcctgacgaaggctgagcttatggcgtagatatatgggtaccgtgcagctgtacggagtagaaaatagagtgtacacaagcagaaggtaagagcacatgactagttaattaacagcgattactcatccgattaagcctaataacccgaaggaggggccctaagtttccctgtctgttcacagccacgttcaaccggttcgtgccagagatacagtatgtaatggtatgtaatggttactggattattatttatttatttgatatttgctttttactatgtgaagtgttttttatgattttcatttcatttcattttttatttcaattccattttccttttattttcactttttaaataaaatataattatagacaagactataactaactactgtagggcgggcccatcgtcaccatttaacaatctcctcgacatctataatatcctcttctcccctccggtacgaatttaaatcattgactcaatccagcgcatccctcgaccacttccgggtacgcttgtttaaccttcttcgcctcctttgtcgatcttgcctcgctacccgcgtctgtggagttgcaacttgctgtgacctccctgccttgcgatatcataatcgacctccttacctccgtgcataagaatccgattctctctgtcaattgcgcacgttgcctcttcgtggctggcgtgtttggttagccgagcgggccgcgatcttacccaggaaccttatcaccggtatgtccatgcgtcgcaacggaaaatcttgagacagcatgtactgaccagctggctatgttaggatcgccctcgcgcattgcattctcaatcaaggagatgaccacttttgaatccaaccctgatttcaccctctttcccttccacgcccgatccaagatgatggctgtcgaagctgcccggccgaaacagctatacttcgatcccatgatggatccttccatgttctcctttcccctggagagtctccccaactacgcacacggccacggccacgatatgcccagtgcttccaattcctactacgatacccaccctctgctggagtctgcagatctgcacaatcctacatatttctcttctgtaccagccacaccgccttcggtctccgcgtctcactccgcagagccatatatttccaccgggtctgcctccgggcagtccattgcgagcgcatcttcttcggcgatgggatcgccatactcgggaacggcgcaggtatttcaggagaattgggtgaatacgaaccacggattgggtctaccagccgcagtcatggacgaccttttctcgcaggaatacatgggaagtatgttggacatggatatgccctatcaagaaaaattcccggacccttttgtcggtacgtgttgatatcaatcgcaaaccgtctggtgtactaacaatgcattcagatccctcattgatacaaccgacgcaacaagggcctggaattaccccgactatctcataccccgaccaacccacctcttcctactcaaacgtgcaaccgaactacatctcccactctcccgcaccttcacctctctcatataatgatctcgcagagcaccactcacccgcaatgcagcacaatgggctatctcccctcatggtcccgcacaggtcgcattcacgaccgctctctatctatgaccgacggtcgtctatttcctcgattcattcccgacgctcgcaacacagcccggcgctgagcagcatcgaaccggacgaagaaattaaggagaaagggcgctgcccacaccccgactgtggtcgcgtcttcaaagatctgaaagcccatatgttgacgcaccagtcagagcgacccgagaagtgcccgattatgaactgcgagtaccacatcaagggtttcgcgcgcaagtacgacaaaaaccgccacaccctgacccactacaaaggaacaatggtatgcggcttctgcccgggatccggctcccccgcggagaagagcttcaaccgcgcggacgtcttcaagcgccacctgacctccgtccacggcgtggaacagaccccgccgaactgccggaagcgcagccccggactaaagaagggcaccaactatagccccgacgcgacaggaaaatgttcaacctgctcagcgaccttcagcaacgcgcaggacttctacgagcatctggacgactgtgtcctccgcgtcgtacaacaagaagagccctccgaggcgatcaaccagcagcgcctcgcagaggtcgcgtcagacgaggaggtgaagaagaccatggagaagcaccaactcctcgacgtgcccggcccggtcgagcaattcgacgattacgaagaccaagaagacgacgatacccaagatcccgccagctggcgcggcctcaagacgaaacccagatcctcgaagagcaacatcccggcctcgcgcccgattatcggctccggaaatgcagtctccaagaatgtctccaagcccgcccgcgctgtcgtaacccgccgtcgcaacaaccgcggcaactacccccagtcctggggctgtcccagcagcaccatgaagacgaagaagcgcgtgctgtgtgtttttgatggccagcgccgtctgtggaaagacgagatgatgctcaataacgagttcgaggtccgtctgagactgctcggcggtgcgggcgatggcaccaaccgggatgcctacgttaccgatctggacgtcgagacgatgaagcgcgctgagggtgtgctcagtgccacagaggaggagcgtggtccttggttgaacggtccttcgccttacattatgggccggccggcgatgctattgccggaactgtctcatgatgacgagctttcgctcaatgaattaatggcttaaacgactttcttttgtcttttctcctactccttactctctaccttttgagacctttcgtgtatttctttcatgtctcatgtttccgtacagcagtggcgtcttgacgagcgatttgtctgattacggattatggatgataccttgggactgacacttaatgactttcgttctttgttttctgtttctgtttctgtccaggctggtctcgtggcttcatgcctgatcccgctggcgggattcgtaccaagacactattaattggggactaggaatgagtgtctgaattgaaaacaaaaaacattccatcttcaaatgtcttgaattctcagcaagtgtaggtctgaagtagaaaagatataagaatgccatagacccccacctaccgatcttcacccccatgttctgccatcttccccggtgtttaccccatccaacctccacgatgcaattgggactctcagaacatctgtccactctggtcgcaagacgttttacagctgcccgagatagcggccatctcgtcttctcctcaacccatctgtccatcatcaatgccgcaggaatatcagtgagtgacgctaagacccgaccacgacggttctaacctgcatccagtaccaactccgctactgcccggccctcgcaaagaaaccctccaatctcaaggacaatggcccgaaaacgccaaagttcgatccctttcagaacccatgtccggagcttctgatcgcccagttcccgcccgagaaccccgcctacaacctcatcatcaacaaattccccgtcatcccgaaccacttcctcctcgtgacaaaagactggcaggcgcagacggacatcctcgacaaggctgacctagaggctacatacgaggttctgaaagcctggaacaccgacagcgatggctccaactccaacagctcgaagagcctcttcgccttcttcaactccggcgacgacagcggcgcaagccaagcccaccgccacctccaattcctccccgtcgaagcaatgcgccagccaggctcggactcctggtccccactgatcgacctcctcacgcaacaaaccccccaaccaacctccccctcccaaacaccaacacccaacttccagcacctccccggcctccccatcgcgcacttcgccctcccaatcccaccaaacccctccgccgaaatcctgcacgacatatacataaccctctaccgggccgccgcggcagcgacgcgcggacgaacaccgagccaggacaccgagtcgctgcccacacacggacgagcgtgcataagctacaacctggccatgacgcgctcgacgatgatgatctgtccgcgcagacaggagacggcgactgtccccgtcgacgctgacagtgtcgctgcgcgcgagatcgcggaccacggcgtgctctcgctgaatggcactatcctggctgcgacgctgatggttaaggccgagggcgagtgggatgctttgcgggagaatccggagcatctgacgcaggtgcttgctacgattgggtatccgcagacggattctcggggttcgtcgctttgagggtttgctgggagtatatagctacgatgggtagactacttgcatgctagaattgaatacccaatggaattgctgatttatagcttgaattgatgcttgtgtttctcctatctatgagagattgaaataattatgtcatgattgcttaatagaagatacttttctatatgctgtatctacttggagcgaggttgagggaagaacctatatgtagcagaacaagatagagaaaggcctatcagaacgtgctgggaagcaacaatgttagccataggaatgacaggccctcctaaggtgtttcttctatctgtttatcaacagacttggaagaccaacacagggagccaacacggaaattaaaacaaggccaataccaaagccaccgtaattcagagacatgtttcctttattcggatgtatctagaaagaaggaaagggaccattagacatgcagtgcagagccatgtgccagactcatgtaggaaaaagcgaacggtgagattcattttctcagttctcgctttatgagtggatggcatgaactgcagatgagattgtttacaagccacgagccatgatgtgaaacaagggcagaagccgggcgcataagcagaagctaagaagacaaacccttgcctatataggaagctgggaatgtcacacgtaatagcggaagccacagttacctgtcaactgatcgtagaagaattcgagttcgaagagtgagcggatgttgctacaaataagcctgatagccaagctttcaggcgatatagctttctccacagtcttttcgggatacatccgattgaaaaggtcatcataccgatgtaaatcataggcatagaacaacattgcgccttatcgggaagctcgggatgtcactcatattctgcagcctaatggccactgaggctcgagctattaggttgctagcgtgcatcgtgcgaggaggcgtcgatttcattggctgtcttgttcatcctggcgtaaacgtgctggatgggatggttaagatgcttctgtggtcaaaagaagacctggcaaagaagagagtaagtcttgtacatgtctttccgtggaaggcagtgctcgtgctagaagccagcggtgagtcgctatcacttgcagcgacggcgatggtatgtgacgaccacaacttcgacaatcggtccgggatctagtcaaagaagctatagtcactaggcctaattgagatcccgtactttcacatgataaatctgcatggtgggttgatattagcggccatatttctatgtttacttctttctagtcattatctaactacagttgagtattctggtggtaatccattcccaatcagacttcacaagaaaccaaacacttgcccagacacaaagcgaaccacttgcctgccaagttgcatggcaccaatagaccggatgactccaaggaagctcactacgagctaaccagggggctgtgaccgggcgcaaagcatgtgatctgtataaatccgtcttgattggccaaacttggctctaatttccgttggcctcctttattggcagcctggacgcttttgcacgcttttgctaggccgtttatggtgttatagcctcacattgcccttgatctgcccgtgttctcgtataggattggaccccacacttgactccatcgacatttaagaagacgccttgcgctcgttgatcagattcttcctttaccatcgaactacggacggaatattcaccatggaaaacaacaaagaatcaacagtggctattacaccggttgctgccgtcgaaccaacaccaacaccaacgccagatactacagtcgaaccaaccgcaactacaacaagatcattgccggtagccgacccaatggcgatcatacccgcgcagagtggacctcccccacaatacgatgagtatgcatctcggtctaagaaaacatcccaagctaacaaaaccagacaccagaaagacgcaatcacagcacctgcaccggcagcgacattaccacaaaccaacgagaaagccgtcccaaccggcctacaagttccagtcgcccacagcgttatcccactagcccaagttggtgaaaagcccgcatggatctgttgtcccttttgcttccacgaggtccaaaccatagtgaacaaggagagcactagcgccacaacgtgagtaggtctatccccgcttcaccttggtctcacttctaacgatcctatctctcactttagtatggccgcagtgtgctgttgtatcttcggcggaatctgctgtgcatgtctaccattctgcatggagctgtgtcatgactcgcatcatttctgtccaaattgcggcgcgaaggttgctatacatccgcatgaagatgaatgcgaagtacagacgtttggaccggactcccctcaggcgattattcaagcgccggggttcattcagcctccgcaggcggttatgaagaactagggtgacgatgtacatgttgaggagtgacggagaaggaatggactgctttgcttgatacctttgtttactctgagacccgcgttactttactattattaatgaaagataagtcgagatgaagcatttgaattttatcatgccctgacgcagttaactgggaccagacatgaagaaactactaggtcgcttaatatctctaactactcttagattgacgttactttactcttaatgaagaaattgtgaacaagcatttgaattcattcatacctgacccatgcaagatggaccagccaccttacacaggtcagggcccgggacctaacaccacgaccccctcaggggatcaccccatcggcattgggcatggtgccaatcagccgctggaacaggtcagccagcatggcagccccgagggggtcgtggaagttgcgaatgaccctcgcaaactcaatcttggtctcccagatgtgtgtgctgagagcctcgattgcctcgcaatcgagcgggatggtgtttgccaggacggcacgacggtcgatgctgtccttgaggttgatgatgccaacctcgaaggcgtgacggtaggggtcccagggggccaccaaggccgcaccggagtgctggctcatgctgtgtaggaaggaaggttagcatgttgtcaattggggtaatatatagggtgagacggtcacgtgtctcattggtttgtttgcataccttgcggtggagataccggtgggaggagtatgaaggatgtgggtgggcgtggtgttatactacacacgtttaatgagatggaagcaggattgggatggttggagatgcagttgtgatgatgcagtgcgataggattgatggaacacacggacgtaagaacgaaagaagtttttcacaagatcgagaaataaatagtcacaccattgccttaagcttaaccgcgacatgggtcggcgtcgagcagagggtccggaacatactacaggctcggcgttgagtagaacgtcgaggaggaaggtgataatgaacaatgatgacattcagatcaaacactatagctttgagcctgtcgctttggcgactaggtgcgcattgacaggcgtaacagcctttccagtttgatagaaagcagtaatattctccatacccaacctctcaaatccgatatgtgagtccactgaagcaccggcattgtgcgacatcatctcaacattcttcatgcttgcaagctccgggctgacgcgcggctcattgtagtgcacatccaagcccgcagcagcaagcttaccactcttcagtgcgtcaacaagggcactctcatcgagcaacttgccacgggcgatattaatcagtcgcgagccgtccttcatctttgccagcagagatgcattgaggagtgtctccccgctaaacggcgttgcaaccatgacacagtctgaaacagcaaggagactgtccatggtcttatggtatgttgccttcgagacggcttccagctgtgcgggcatctgcacgatgtcgtaatagtgaatcttcatgttcaaggctaggaacgccttctcggcagtgcgccggccgatctggccgaagccaatgattccaagtgtgtgtccattggggttgtgtgagaccatcgccaggttgcggtttgcatcgacaaatgcatcgacatccagtgcgcgtgcggcaatgtgtgaccaagagaacaggcggaatgtggagattatgagccagattgcggcgtcggcgacggattctgtgcatgctgcagcagcattgcagtaaaccacccctataaaatgaagctgttagctatttctcctatatgcagcttcccgatcgctttgttgtatacacacccttcttcgccaaagctgcggtatcaacccagtcaaatccagcacctgcactggcgtagaccttgcaagagtctggtagcagtgagatgagctcctcatcccagttccccatctcgccgccggtattccagaatgggcggtagatggcgaagaaatcgccgaattggcgctctttcagggctcggataaactccggccgagacatgctgtaggaccggcggatctcgaagacatcttggaacttgctgtattggtcgtgattccagcggatgtcatcaccgagatggaggacaattggtttggtcattttggatggattttgggttgtatagatcggatcggaggttggaatagggttgggggtatttggtgaggtcaataagaaactagtacatggaaaattgtaaaacttttatcaaaatctcattttctaagctggcaatgtggaattagttaaatatctcttttccgattgtcttgatgtttgttgcggctattgctattctacgccacggctattgagcgggtatcgatctcccggctaatgaaatccgacaccaaccaccgaggtaattattcaagtctaatgaaaggccaaggagaggtaagatggttgtttttcaatggagatgaatatggaagatggccctgattccgagcccattcttcttcgctctgctgggggagttttgctttcattagtggaagcacattctccagtgtccctttaattcggttgtaacgagcatgtcgagactttctgcgtgaattgtgacggcttggtaaaggagttggatctataagaaggattctgtcagtctatatttcatagaagaatggaagaacagtttcataaatgcagcaaatcatgaaaagggaatagaattggacaacaggggcttttttggaagattttaaatcttcctgattggcccttatcataaggacatgaggatgcaaagggtaatccacgtaaagcaagatgaacagaagacatgagcaagaaggaaatgacattgtcgacatgaggcaggcaccttgaagggagataaaacagcaagacgtaccgggtagtgtcatccttgacctcgaattattcgcaagatcgagaggattcatcgctcaatccaggcagagactgtctcgttgagcattgtgtgccacgcagttgtagacatacatctcgtctctgggtaacagaagccttgggtgagtctgcagtttggttatctgtttccccatcccttgagagtatattggagaaaggacctagaacagcaaggtaaggcgaataagaataggataaaatcccttcatcactgcagtgctttatagcttgtaaagaggtggtagagggaggataggagaaagtgaaatcgagtagacgaacgttctcaatagtggctagagacttgacctgaatgctttgatgaacttatcgtaagtttcgagatgttcggtcgcacatctcgatcttctgccattcttgtgttggtatcggggcatctgtccatggatcgagaactttatgattggagacatcgacaaagtcataaagttgcttatgggaatactcgttgtggaagaagaccttccagatttctgcgtgaggagatcgatcatgtcctaatccctaatgacagtaacatctaatatgatcctccattcgcccagatgtgctcagacaccttcctccatgacaggtggcagggttttgactgggtcggtcgaaacaagctacagcgcactacagtgatgagaggatcatcgactgcaagtgccgtggatgaggatagtttgactagtgatataaataagagcattaaatagtaatttggcatttaatgcttaaaattgtgtattacctcttattcttatcaggcaaatataagtcattatgtagggtatctgatactctttaacattcgtctcacttgtctatcacccagagtatcatcaagttgctcattttgactcttttcctatcattttccataattttcatgttttactttggcactctcaccttttaattatactctttctatttgaccttaccaactccctcctcttccgattttataaaaatcactctttattcatacaacatatcccttggatttctttaacttcctacatccacgaatcctgccaaaggctgacaattaagacccttttgactgacttcactgctctgatactccaaaccctctgacccatccagcctcaactatgcagtgccatttaactgagatggcgaaatcaacctcacataccaccacctcctcctcttcctacaccgacaccgagtcctccatctcggccggaaattatgatccctccgaatccctccgaatccatctgactctcattttactggtggtcatgctcagatattctggacaacaacctgaacggagagcgtgacaaatttggactgaggattgaagacgccatatgaaggataatctcacaagagacattctcctcgagacattcctgctttatctcgaaccgacaaatgctccgtgatactcgcttcacttctggcacgtcttgccactagagtttgaaaggtttccttattcagagacgacagggaaaacaattagcgctagaaaggcggcaaggtccaatcttgcattgcttctcacttttgaccttatggtgatggctgtacatgatgcttgatacttgtttacagcccaaaatcatgccacaccccctcctcaatccgaggttgagtgagcggattctgtgcaagtagatcccaatgaaaatatgtacattgtaatgtactcttaattacatatagcagtgagttggccaacgaagatgcaaacgattacagccaagtcgaccgcagactggtatgcgcttgaccaacccccacgagatgcaatgtggctaagcaaagttgcagattcacttggtctgccgaggccagatctcacggtcatattcacggataacatcaactctcagctgctacttacaaagaagggtggcaaatcagccacaaggtggttggcgctaagatacttcttggtcaaggatgcagttgcccaagggcacgtaaatatccttagagtcgacaccaaacagaatctggctgatggatttaccaaggcgcttgcgatggagcaattccaaaacttcgtgagactgctcggtatagcttgaaccaccaaggaaagttcaaattttttcaaccattgcagtacggcatgtcatcatcaacaattctacatcaatcaagggtgaatgtgagatctgtaagggggatgttgggtatccagtaaggctgacaccagctagacgtcattaataaaacatttcactccaatatacagaaaggcaaccaagcggaaaataatacagaggaacgctacagcacagagactcagaccagctgaatacaaatataacaaacagtgcacacgcgctcgccaagatacattacatatcgaagaaaagaaacaaactgaggataaatggattaaagaacataagaacaaaagaacccgcgtttaaccttaagccaacctcgggtcagatggtgatgtcgtgaatctcgcaccacttcttcttgcatgtggcattgccaaaatggtaggatcccccattcgcccatatgtgatcagaaaccttcttccatgatacctttggtggctcgttcacggtcaacccggaattgggcagcgagttgtaagtgtcatggcgctctgcgtgaattgcgacagcttggcaaaggagtcgcatctataataatagatcatgtcagtctatattatcatagaataatggaagaacagttcacaactcacatctcgatcatgccatgcgggctttcgcactcgctggtctttcgacttggtgagagtgcggtatcggcctcgtagcgtagactccgcctccttgaacccgcccaatcgcttgatttccttgtatgatagccctcggctcttgcagtctatgagaaatgcatttctctcataaatgtcctgcaccgtagcttcggtcccgccttgttcttcttcgctctgctggcgggaccgtccttcggtggttgagacggagaaggatggactgaagctgcttgctgggttctggtccggggattcgtattctgtgtcggagacaggtggctgtgttggagcgtctcgatgcagtccaggttgatactcgggaccattggtgatttggtagggtccagaatcttgcaaatgggaaatgtagcctatgggactattcgggcccaaagacagaggcgcaggcccaaaagcctccatgggcagtccattccttggctcgggttcattgtattcggctgggtagttgtatgtattggtggccggccaaggtaaattgtaaccatcctgtgtatgccagctgtcttctggtgggctagtgaggtcaggcgtgggataccaagcctcagttgtgctgggtggttgagagataagccattggatacttccaccatagttcagcggctttgtgtcctgaggagtgatggatgagtggggatcgacctgtcttcccgtggggtagttggcgagagtcgggttctggcagttgaattgggtggtggaaaaagcctgctcgtccattttgacatctgggatttcaaaggaggaaagaggaggtgtttccccagtgcccaaaaggaaggaattgctagccattgtgaacattttgccctgtggtgctgggtgagcaagcccagtgtgtgtttcaacattgcgtgtggtgaatggctcgtcaaagtgctcaagtgattcaagatcagattcacagtaagtgcttccgttgcttgaattcgcactgttgaggtctagccgagtcgtgaaaggagacgcgccctgcgaatacacagccatgtgaggatcttccacatggagaggcatgtagcgcttgtcctccgcaagaggtatcgagtttcctggcaaactattgcgattcatcatggttttagcaagctttcgcggacgacgttgtgtttggattgttggagggtgatgtagcaattgaaagttcagagaggaagttgatgtggagggggaaaagatcgaataccagtcggtaggggaggaggaaagctgtttatcataatcgccaaatgccgaagagtaagtatactccttcgggtatgccatccatgggtctagcaccccaggaatagccagcacgtctgccatgtcgaccatagatggagaaaattgaaaataaaaagattaaaaggattcagaagagtattgcccagttttagacggttattgtcttccacgcttcaccgcaattgctggcgaatgttgtacacgggttgtcactgggtgtggacgaccgctatcccgaagatttcctctttgtcagtacacaccggatagtgtggagaaatcgaggagacctgcaggtttgaccgttatggaggttagtgcttttttatatatggagaggtttcaccagaacggtaagaactgattgggcatcacttaccgtatggatataatagccaccgtagactgctagaaggcgatgtcacgagtgaaaagtagggcaaaatttcttcttgtgaccttgatgagcagacaaaagcctctagtggctctcaagagtagctatacttcgaaaggggacggctgttcggcttgagagatcaatatgggtaaggatcagggtgtaggtcgagccgttggatgcaatgcagtctcaggtatatcggcaatgaccttaggagaaaggaggtgaagctccagattgctgtagggttatatctcaggtagattgccaacacggagagattgtttgagagacagtataaaagttggaagtcgaggatgagggatggaattgataaggtttatatatcaatttacgaggagatacagcaaggctagggagcgatattttccgggtcttttaatagacagaatgaatggatctaaccagtgtacatgaaccatgtctatcatccgccagctcatttcgacttctcggcccgtttaatctcagctgaggcccgtgcaattactagatgagcaagaggactgtcggtatgttctaggcatgtaggagacggagagaaacaaagagaaatatagacatgggttggtctcaagacttctgaaccctagccaggtcaaaaatctcaggtatgtaaatcagctggacccccgtcgtaaccgtgatccacttgccgaacgtttcagatctttcctctattgtctagcgtcatgtcttgatttagcctcgatactgtcggaggggaatgaatgtctaggaaatatgtgaaacgggagcgaagagtgaacgggttgtattctcgacggcttcctgaagaagatcttcactcccggccgttaggcccaagttaatatattcccgtcaatatttgtttttctttgccctcgatatctacattttatcccatcctgagggttgggtgaattggccccggaactgcagcccgttggcaacggtcctagcattgctgatctccaccatgtacaaccctaaatagagctgctatgcccgtctgtgggtctacctgattgacaaaccgtctaaagctccatgatttggcggtggctcggccagttttggaatgttccatcctgaccgggtagccacagagagcttctggggaagcctaagtggcatccgggccaatcagatcaaggggcccagtccaacctgcttgagaaaaagcaatgtaaacaccatagcggtagaagcaatttcctggttggagctggttggacaggaacttgccgactgacgtgagctatctagtctttgaggctctatcgcccaatactaatgccaacatgagttcatcgggccttacgaaatgcagtgttaaagatcgacaagatcctagccagaatattttctgttgggatttggaatatagtaaagctataattaggtgcattgaactttcaaagcaaaatatgtcattagcttccacgattgccgagagaatacaactaacacggtgaacttaacaaaagaactcccgagccccttttccccggatctccactgtctatagacggacctattcaaaagaagcttctttaacgaccgctggggtggcctaggtggcgttgaaaccgaagggatcaaaaacgagcctgcagcagcacgaacgcgtaaagattccgtccggtcccctagctaggggaagacctcagctcctgattctgtgggaaagccccgagggaatttctttctttgaggcaatgtttctgttagtgttacagcttcgcagagttaccgcggaggtaggtttgggatttatctagtttccaggttgcaggtgctcgatcgagcgctaggcttcatttcccgcatatgcggatcatatttatggatcttattattattccataaataccattacccgatgatttatcctatgagacagcatcaagatccgtaatatccggaacaaatctggggaaggggatggaaaagacaggacggtgagttgtgttgacacgaacagtggagggatgatcagcggagaaccaaaacaagccggaaagaacctatcaaaaaagcaaaaagaggttggtgctatctaatttaaaagggatctctcggcagcctgttggttgcccgttcgttgtcttttgggtattgattggttgaattagggcttcagggatcccagataccggggtggtgggtaggtactttagcgtgccttagtgtagtttatctctgatttttggcactaaaaatgccaagtagatcaacaggttgaggtgcattagctgctttgctaaaaacagaaacaaagcctacaacttacgataatttggaaatgtgacgtagaggctgggagattcttgttcaagactcggcttcttcctaacagggaaagccttgcttgtcgtagaccaggaattggaatttctgattgagacataagactcaattccgagtttggagcaacatccagccgactgcatttcaggtggcttgctggcatgtagctatgcactgtggcggttaatgcgctaacaactcccactgaaaaagatattgtgacacaatgttaggttttgtttcattatattttacctcccaccaaaggtttcgggaagtaggagatttcgaattatagctcctagagctggtagtacttcttcatcttccatggggtgccggggagatgcttctcatggatccggacttgagcgggggacaagcttatcagttcccctagtttcctgctctcaatagggaaaatagttgtttagtatagactttcataaggagcacgcaatataagcccagcccggtagaatgcaacgcaggggaaaatgccacacaaagacatcgaggcaatcgcaatagtagaacatgttatctacttgactaagcacccctgtagagcttatgatataagatttgccggtaggaaatgccataaagaaggaattagtgacggccatccccggcgcagaggccagacgtttgaactccccgtcgtgttcccgcttccgtcggccagctgcgtcgttccgggacattaaccagtcaaagagtcggtcaataaggagtagattgagtgaaatgagccggttcgcagccctagtcgaagtgtacagtatcttcggggaggtcatgaaagtgcgacggtgtaggtcgatgggaaattatcttgtttcaattgttgatagatcagttagaccgaatgaaggatatcaacagttgatagaaatgaagaatatctatgcacacatagacacaaccgatatatgttcggaagctggtgtatgctaagcaaaatgatctctcggttcttttttagctagaactaggaagcagctgagaagtcaagatgaaatgcattcacggaaataagccctgatgttgctagttcagtcctgtagcatccttaaaatagcgtatagttctaacttctaaacacttgcgagaatctgcgacctctttaagaatagaataagagagacgtgagattcatgaagtcaccccttaccctggtttttgaagaaggcgcaaccctaggatatataagatcgcaaatatcacaatgatttcgaagaatgataacagcgcttacactcttcggctgtctccagcagtcggagtagtaaccaacacccctgtattttgaaatttataattagaaacgaagctaagtagcccatcctacgttttatatatcaacgaaatagaagcggtacatgttgggctgcttattgttcatagttctgtttcaatttagggtttactgtcggacatgttattatgttattacatgttcctaaaaccgagagttaagcaattctaatggcaatagcatcctgacttggagcagtctctgagtacatttccttttcctctttttggaaaggtagagggaacgaggccgcacgccacatagaacagcgtgtataatcttctaatatcttaagaaaataagtatgaaacctagccaatccatgcatggtcggggcaccgacgcggtctaaatactcgcgtcaatagtttgaccaagtcatattgatatcgtgaaattcacatggggtacatgccaattcaagccagttcgtggcgacgtacttcgtaatccgtgaacttacgggaatttctagactcatggtatcatctaggctttcatcgaactgcataattcctatttttccctgaagcattgctcgtagtccttgaccaattcggctccgatgccggatgtgctaagttttcggaccccgtataggatggcgatcaccgtacacataggagcacaattcctgtagctctagaaccttagccgaaatcttcccatagaaggtgggaatatagaattcagatactatgcccgagattggccgtacattgggtcttgatctatactatatatcagaagagggggtctgaacgcgtaaatagacttcgctaagaagataatgggtgtttctgcggatactggggtgttaaaatagaagagtcttcattgatatcaaaatactcagcatcatgacctccgctattaatgcaaaacatcaacggcaaatgattggaagtttgagatatggtcggaaaaatcaaaactatccagacattgtacctccattggaggaggcggaggttgaaaatgtccatgctgctcaattgcctattttggatttttaagtaaggagagaaaacgacttccagggaagttagttggacgcggggcactagaaacttccagatgaaagactacatagaatatagtgcatgcaataagactacggcttaactaatggcgtatcccatatttacggtatgacatggtagatgcaggtaaacaatagaaaagggaggttggcatggctgcgagagatatgtaagagacatataatgtgagaattggtcaaggaaataataggagaaaacatatacaaacgaacagatagtacaaccggccggccgcaccgtcttgttgacaattcaagtgcccaaatgaactatttcttcaatgatgagcagcataaggcccacgcggagttggtgctgtgtgatccgattcctagggaatgcaagaacccccttaagccgtccgcatctcaacttcagaatgaacgcgccagactacttgtgttcatggttggaggtggtgcgatgttcattcataatgaggggactggtattacaagttggaagtcaagtgcaagtagtccaccaggagcaatgtaggaaagtcatcgtattttaaaaagatttagtcatacgcagagcggcaagacacataacggtgacgtcgcatgagtgcccaacgagctgaatcttggccagacaatccgaaaccagactagaagctggatttctagagttgcttagctgccagggctggctgagatatcgggatcatgtatagtggggtgtgaaacccgttaaggttgcagcattctcgataggcttggcgtccctgggaccctgatggccgccaacgtttcgacaaggtagaatagctgcacagtataacacctgaatctcagccgttgattgtcaggctgggcttatccgttggagtgtggtgtacatggtcctgtacggcagcctgaaaccgggaaaagtctggcaccacatccctagcaatgtcatggtctaatgatgttgtttgttggttaactgtagtcggctttccgaggatgaagcgatactgtcaggccaccctttacgaccaagttgatttgcagccgcgcgagacacttgttcgtggtagccagtaaagcgccgcaccagttgtcagatggaggtgggccgtattgcgacaatgtaggttgactagctttttgagagtgaaaggttggtctaatgcaaaatcaggtgacggggctaagggtatgggaatgaagttagaaatacaatacagaactcgttcattgggtatcgaaagaaacaagaaagaccccacgaagacgatgcaaggggatctagtaaagaccgaggtgaagttgagcctccaggccgtctggggtgtaggtacgaatgcaaccaagaaagcattatgaagaatcctcgaagctagaatcggaggaatccgacattgaggagtcccttaccgggacagggacaggagcgccgatactctccaaacctcgagatttttccagagctccattggaaccatcgagctttgtattaggatcaacaccagcttcctttctgagtcgctcatagttatcgccagcttctttgatcatcgcctggatctccacctcacgaactgcgatatctgccttctccttcctcagttcctccatccggctgatcatctgtgtttttgcgacttccatagatgtcagagacatgcgcaacctttcaaaactgctagccagtcgtggaagagatgtcactttgggaggagtcctcggacgatcaataccgcttgacttgccacgacccatggccgaatgaacctgagcggcttcataggcagccttttcctccaagtcagaatcgtcttcgtcggagataccctcagcatcctcaataaggtcacgcattgcttcacgatccttccgcttcttctcgcgctctgcctttcggccgagcgccattttgccatcctccgtgaaggcctcgaacccttccgcaaagtcctcgtcgtcccgaactagtcttgtatcttgttcgacttctttatctcctcttacaaccgcgtcccagtcgtcagtgtgggccgcattgttcacgtccaatgaaatgaactcgtcctccgcaccgtgttccatagctaggcgtgcgcgccgggcttttttctctcggatctcggcttcgcttgggatatgtgcttgtgccgggagagtcataatctccccaaacttagctgcaacatcgacaaccttgctggtttcatcgtcggtagttgtcttcggcgttgagggcgtggaatcgcgaagttccttcaagtagtcatggctataggtaggccggtcttggtcctgaccgactcgtgcagtgattttctcagataacagggaaggaagttgaccggcactttgttctattgccttgcgtccaagaccgtggcgttttggtgggactacttcgctgtcttggtctccatcgtttgacgtctcggggccgaaggataactgcaacttggatctcagcttcagcctagaggaagctggccgcttaacgaccggctctagaaatctccatgtcagcttcgatcgtggtaggcgaatatctagggtagaaaaaagtaatcttagtccacatacctggcgcaacgcctccctcgtcctcctcgtcatccctgccaaccttgcggggctttctgcgattggcaaatttgctgctcatatttggaataacctagcaatcaaaagaggtaacgaagcgatgcaagttggtggcgtgagaggtgtgaacatgaagctgccagctcttatcgcatatctcatatccggaatatcgttcctccggcacagcttgcaccaaactcccaaagtcatcgcggtatcttgaatcttgacaaaccccaagatacccaagcaactcgcccaacatgcctcaagctcagcctgaattgaagaaggttagtgccactgctaatatatgggtctttattgtcctaagatctcagctgacgtcgtgtctttcgtgcagtacatggagaagcgggtcttctgccaactgaatggcaaccgcaaagtcattggtatccttcgtggctacgatgtatgtgtacacccaatgatccagacttcgctatgtcggggttcccgcggctcgttgttgaagataggaggatgacggtccgatcgcacgcggaataactaaccatgctttcgcgcaggtcttcatgaacattgtcttagatgaggcattcgaggagaaggatggcgcagagaaggttgccattggcatggttgtatgttcaatccctatggactagctaagatccccgctaatggatacgcattatcaggtcattcgcggcaactccgtcgtgatgctcgaggctctcgagcgcatatccgataaataagctacgcatctacacgcacaatctacgacgtttctttgattgaaggggcacgcacataggcaccactcgatcaccgagtgctgggaaaagagctaatgctactgggagtttctgggtcggtttctcttatgggaacaatcaaaaccttttttctgttctattttttttctgctcgtttgctacggcgcattttagacgactatggctatcccaatgactttctgactggtacgtctacactagaaatttaccaggggggatgaacacaaggcacaactagttggtattggaatcggaagataaagctgaatcaatattacgcctgggagcatgctttggctccatcctcctgcctgggtcgatgagagagggtagagataataaagagataatgataaaatacatgtgatattcgaaggaacaacgttggatattcatgtgggtcgaccaccaaacttgagcttcagcttgggtgtagacgtggtaggggctttgggggttgcgctttgcgcaggtgatggtcttgggatgtgaattttggggaaatggttgggagtaggagttcctggagccaggccagttttggactgcttgaacgtaatgcgggttgatgatggtgcgtgcatgccctggtcctcgcgcttgcgtttcgaagccagacccatgcggggtttggtagatcgatagaaacgtaacttgccatggccttggttttgcacactccaatatcgaggaagtttcatccgcacgagcttggaagtgattgggtcgtacagtgtacggcaaaggtcggtgagctcggaaagttccaagagacccatggacggtgagttacatgctgcccacatacattccttcatagatgtatcgccagaaagctctcgtttgagggcttcgatggcgccaggaatagtctggcgtcgtgcgatgtcatctcggcggatttgggtagatgattcttgttcgatgatcaaaccaccgttttgggaggcttcggtttgttgaggacgaccgaaagcaatctgtgctagggcctgacctagcaaacgtaaagattggtggcgtatccagggcgaggaatcggccgataatgtgaacataagccaacgaagaagctccgggctgtgggaaatatccaggtcgatcaagcattggaaggcttgcatccggagaaggtcgtaggttcccgctcgcgtgtatggaatgaaacgcatcaaatccaggtccatcatcttggtttgcattaattgcgcctggcattgaagagcagcgcgggagtagaggttctggaaagagctagaccattcgtccatgcgtcgatatcggtcaaactcggcgatagcatccttgtccagttgttcctcggcctgagcctcgaggacacgttccatatcgaaatggtctaattcctcgtccgtccgcacctcgctcttaccaagcatcgcatgacagagggacttcatcaaggaggcaacatagaagttatccgagtactcattgttcgagttgtcattgaacttgagtttatcgaaaaggaatcgcttcacccttaatggagttttgccactattgtcccggactttagagattgcgtcagggatgacttgctgaaggatgtaggccgctcggtcagagaagtcattcgatcgagtcatgggcgatcccgggagacagaaaagctcctggaacgccttctcaagatgatacagtccaacccaatcaatctcttccttggcatgttttaccaaggcacgcgcagccgtagtacgtatgccatggaagtatcgactatccatgagcgttcgaacaaagatcgtagaaatcagagggtgctctcgttgagcagtcatgtattgtaatgactgataatgttagcatagtgactcaacttttcaagacagcagtataaattacctcgagttgggccacaacatctcgatcttgctgaagctgcgagagatacatgtaccctggcataccgagagacagtttacagatccactcgaagtctgcatccattcgtatccactcataggattcctgtcccattcgctcctcgtcctctttcgtccaatcagccaaacgccaagcctgtgtctcttcttcggtttgaagcacatcccccaggcagtacagcagaacctcttcttgaacttccgtatcgcccgaggccacggctctttctctttgttttttgttgcgtttgagccttttgtacttcgtgttgtatggaatgtcgaatttcgtcacgccctccttgatctcaacgatgtgctcataaggagttccatctgcttcgtgaatccgaagggtcattgaccctgtgaagaccggctgcactgcgcccgcgtagacgtgccggacctcttccttcacgtcgcgcaagaatgaatccttgtcgagatctcgagggggttggggttctgattggacttgtctgatcatcatttcaactacgagcttcttcttgttgaatcgctgggttgcttggaatcgtggacatcccgccccgtatacccattgttggaagaatacgtctaatttcgcatgtcccagtcgctcacaggttttttggaacagggaggatgtgacggctccattgggtatatcacccatgcgagagttgaggaaaagtcgagaaataatgcgagacatcgtggccttaccactcgccttggtcagtcggcgatcgagaatgaacaagaccaaaggcgctttcaatgcaacaaagcgatattcggaggggtcaaccttgagaatgttacccatgtcgtatatagaggggcgctcgaagtctaggtcgcagacttgatcagacatctgcttcaatctgaaacggtattcgttgtttccgcaaagctttctcatgaacgtgtctgtaatgtaccatgccacacccaccgtaacccacgtatccgagggttccgcaggaatgatgttgattccagtccactgacaggccagaccgtgcacctgagcccgagtagagtcatacatggggtcgatcatctcggctgggaagagcaggtggctgctgcatattgacatacatgcagtgggaaggctatcggttggtaaatcgtcgacgaaacaaatcttgtaactgccgaatggataagacccgtacgacaaagaaaagaagtcaatcgcctgggccatgggaaaactgctgttttggacttcatcggctctacccgggaggcagaatgcgtgcaaaggaatagcattttggccaagttgctcatcctggtcactttcacgaaagtcggccaggttgacatactcgaatggaccaatggcgaagccaatttgcaaggctcccaatggtgaatatgacgcaaatgaaactgttttgcgggtgtggtctttgggatcgacaatgtcatctgtcaggtcgccggagcacaccactgacatatcaaggccctcgtcgtccggagaaagttggcgggttggcgcttttgggcgggatggggtcgctgcaccggccgcatcttgggtcttccggtcaaaaacataaccaagcgagctgggacatgtgatagaaacctcccaggtacatcgcgaggacatatcatccacacatgggaacaggggacagccgataccagactcgagtgagttagtggtgtaagcatgaggataccgtcgatcaccattttcgacaccgacgaattgtaatccatcccgaatattgtcaataacaaattcgatgttcactgtcaaagccgtgaatcgtggaaggtttgcctctggcgccctggtactcgaaggaccatccacattgtccacagtagattgtagcgcgatttgatcctgtgcttcggccgaagatgggtctagttcatcgatgcggacaccctttggaattgcgatgggcagggtaggtcttgggggagtttgtaacaggctgtgaatcttcggtgtcagtcgctcgtgatagtgtacaccgtagagttgtagcgactcgtagtgatctgtgtattttgttgttgcaggcttgccgttaacgctcagctgcttaatctcgccttgtcgaaaattcaaccagattgtcccgagatctctgcggcgagggtgaattgtgatttccgtccttcccttgaggcttttggatgctagatcaatctcaagttcgactttttgatgtcccacactgaatcccagatcaaactggcgtgccgcggcaccagcgggcagttcgacaacactcggcatgatattctcgtcgaggcctgcggaaataatgtcccagagcctgtcctccagtatcttgaagattcctcagtgacgagatgcgcggggagcgcttcgaagaccatccaccgtcatatccaaccagactcaatatgtgattgtagtattgagggcggaaaaaaaattcgaggagcacttcgcgtggcgcagatcgagctccagatgacgatgaaatgcgagatgggcgattacgcgattatggtgcacggtgtatcgcacggcgctggggtggatcgtaggttgaagaaagatttaagtgagccgcaattaggaagatcgagggcagattagctgcaacaatgcgactcaagtccgaacaatgcactagcaaatcccgtgtggtctcagccaagttgagcttcccttgttcgcgttcccgatgcggagcaaggcacgtgatttcaacctgaaaatccatcttgaaacgcttcctacctctccttttctccacgtatccttgagcgccgagatttgtgtttaaaggcatgatttgattcgctgtgcatttctccattatacccacttgtttgccgaccgcgctatgaactgaggtgctggtgtttcccccgactatactacaactctgcgcggtgacacggcccaatcttcaaaaatgagcgcgatatatcgcatggtccaaggttggtgatatgaagccattgactggcatatttgttcctactcacttgctaattcgaaccttcaactcatacagagacccaagattccctctccgacgaagccctactaccccttaagtcctacaagtattcgagtgtcgataagtcgttcatttctcggtatatcttgaagcactacgtatgacagccttaccttgcccgatcgttaactcggaataaacaattgactcttcccctagtggaatgccttcgtcgaacttgtgccgatgtggatggccccgaacatggtgacccttcttgggttcatgtggatcgtggccaatatcttcatcattcagattttcgtcccagatatggtgggacctgtgagtgttcctgttccttactgggtgttttatcggaagtggcgagttaatcggaaatttcagggtccctcttggatttacttcagctttgcgcttggcttgtggatgtgagtgaccggctacccctccatccacatgatgctaactcatacgaaataggtattcgaccctcgacaatgtggatggtaaacaggcacgccgaaccggcacgtctagcggactgggagaactttttgagtttgtaccgccctccgaaaagccatggatggatcactaacaaggtacagtcacggtatcgactctttgaactgcaccctggccagtctgctttcgacagccgcaatgggctatggatcgtcgcagcttggtgcttggaccgcactcgtgccttgtctggccatgtatttctcgacatgggagacgttccacacccacacgctctacctcggctacttcaatggcccgactgagggcctccttatcatctgtggaattatcatttcctccggaatatggggccctgcgatgtggtctaaacccatcattggattccttgatttcccccaaatcttcggcaacaactccgtcaaggacctctgggtcccatttctcatggctagtttcttcctcgcacatctccccgggtgtattatgaatgtagctgcggcgcgcaagaagcagggtctgccgttcgccccgttgcttaaggagttggtgcctatcctcgccttcactttctgcaacatcgcatggctgttctcgccttattcgactgttctttctgggaaccacctcattttgttctgctggattatcgcattcgtcttcggacgaatgaccaccatgatcattttggcacatcttctgagacagcccttccccctttggacagtgatgcaggctcccctcattgctggggcgatcctcatcaacctgcccatgatcgggttcccggtcattgccccctggctggaactcttatatctctgggtgtacctggtcttcgccctggttatctacatgcattgggcggtcctcgtcatcaaccgcatcaccactttcctcggcatcaactgccttactattcgaaaggataaggccgctgcaagagacagagcctatcgcaacctcggtgaatcgtcccacatcgatcagtctcgcgcttcgactgacacatccaagacacattaacttagtatgcgccacactatcttctatggacgaattgacgatcgacactagttccctgttagagtggccaaaagcgccctggccggcgcattgtttaattgttcaacctcattgtaattatgaacatgtccattccttctacgtgtgttaacatcttgatctgatgagagatataacaaatcccagaggggtggattttgatgaaatccggcatggaaattgtaccctgctattctgcacttttgtacttacaagattattaatatttgtgaatagatcaaaatgatttaaatgaaacccagttcaagttcattaatcgagagaaataatacaggaaattagaaaaggtacgcccaaagaagaacaatcaacgctggcgaaaagagcaaaacagaaaaaattacaaaaacaccgccaacaaaaagttcaaatgggattctgctcccaaattttcatttgtttcctccaagtccaagagcgtcagtcagacctcccagaccaagtccattgattattttatccaatccaagactgccaagcagtccattcaacaatccaccgagaccaagaccatcaagcagacgaccaaccaagccaagcacaccagtaagcaacaagccaacggcagcgatgatctggaacaacggctcagagagcagaccccagagggggttcagcgctttcttggcgtgaggcatatcagcaatacgtttcttgccgttgtcaatggtcttgacaaccgtctcagtgagctccttgatcaggtcggcaagctgatactcctcaggagtggcatcgcgagaagcagcgcgcgccttagcggtcgcggcgatgcgtccatcggggtcaagagcgcggatggctccgttgcactcttgcagaatgcggccgccttcttcgaggagcggcttgacggtttgaacaagcttctcctcgtcaaggtcctccttcttggtatggtcggctttatcgcaggcctgcaagttatgttagtatattgcttttgaggtcttcaatgtcgggttggaacttacctcagtgatctgcttacacacaggcttgactcggtcaagagtctggctaaggatagagatcatcttctcggcgagctgtcggtcggactcagccttcgccgcagcctcctgttcttcggccgtgggcccctcctcgacctcctcctcgggctcggggatgttctcaagcaaggtgcattcgccgatcttattgccatcgttgtcaatgacatagccgttgtcatcaatactcttgccgatcagcgtggcgaggttacccgcagtcagcttgccaataaggttgccgtcctcatcgcggacttcgccctccttattgaccttgcgaccagacatggggttgatatctcgcttcttctcctcaggctcccaacgctcggccttaccgatagagttgccgttcttatcgaggacgtcaccctcctcgtcaaccttacggccaaggagacgcttggcgtcgccttcaattagacgtccgatgatcttgtcaccgtcttgcacaactccatctttgccgacaatagcgttatcgaatccaaagaatggaccttcagccttatcttgctcagtgccagggataagcccagcgcgtccaacaaccttaccattgtcaccccagatttgacccttgccatcgaccttacatccagcgaggcgcttatcaccttcgaggatacgtccaacgactgcaccagtagtaggatcaacaacattgccagacttattaacgaccttgccatcgagaatagagaggtcttcttcgggagcgggctcctcctcggggggctcgtagggctcagcacggcccttgacatttccgtacttatcggtgatctctccatcctcgtcgacagcacgaccacgaagcttcttagcctcgccttcgacaagcttaccaacaatggatccctcatcatcctcgacgaatccatccttggtcacaaagaggctgtccatgccagcgaagataccctcgggcttactgtcgatctcatcctcggggataagctccacacggccaatgaccttctttccgtcgtaaatctcaccctcgtcaatcttcttaccggcgagctccttggggttaccctcgacaacacgggcaatcggatagccgtcgggtccgatgacatagcctgccttgttgcatgtgaggccattgacagcggaaaagtcaggaccagcctcttcctcctcctcgggctcttcctcgggttcgaggcgctcagcccgtccaaggacgttacccttgcggtcgaggatttcgccatcctcgtcaacgccacggccgctcagtttcttcgcatcgccttcgatcagacggccgacgcgggtcgagttctcgtcgaccacaaagccgtcttcaccgacaacgagaccctctagaccggagaaggggccttcgtcgccatcgtgttcctcgatagggagtgccttagcttggccgatcacattgccgcggttgtcccagaactggcccttgtcgtcgagtgtcgagccgagcttagctagtttcttggggtcaccttcggtcacttggccaacgggcttgccggttgcttcgtcgatgatgtagccgagcttgttgcagaccttgccttcgagggtctccaatccggggatattttcctcgacatcttcggcagcatcctcggcggtgtcctgggcatcttcggcggcatcttcggcggcatcttcggcggcatctttggcggcatcttcggcgccttcgaccttgtcgtcgagggcatcggttgcatcttcggcggcatcttcggcggcatcttcggcgccttcgaccttgtcgtcgggggcatcggtaacaccttcggcggtctcttcagcggcatccttggcgtcttcggcggtatcttcggcaccttcaaccttgtcttcggcggtatccttggcgtcgtcgacattatcctcgaggttaatcttgccatcttcggcggtgtccgtagcatcgtcgacagcgccatcaacggcatcagtagcatcttctgcgtcgggggcggcatcttcggcggtagacttagccttgtcgacattcccttcggcatcggaaacaccgtcttcaacctgatcagccgcgccatcaacagcgctcttagcctgatcggcggggatatcgtcctgagcatcttcgtactgatcctcaacatctcccttagcgccatcgaccttgtcagtggcgtcaccagtggcctcttcgatggccttcttctgatcctcaacaggaaccaaatcaacacggccaatgggatcgccatcttcatcaacaatttcaccgtcgtcgttgagggtatacccgataagatcttcagggtcaccctccacaatacggccgacgatctgaccagcagcgttcttgataacaccgccatcagaaacagggaggccttcaagctgagcgatatccgtaacaacgttctcgagatcagcctctccgacgttctcctgggcgtcatcggcggcgttcttagctttgtccgcgacctcgtgcaagatatcgacgcgaccaatcaaatcaccttcctcgtcaacaatctcgccgtcatcaccaacggtttgtccgacgagatcctctggatccccctcgacaaccttgccaatggggttcccatcctgtcctaggatattgccgccctcggcgacatcaagacccttcaaagcagacaggtcgaacggcacgggtaggttatcggtagcagtcttggtggcatccttggcgccacttgtgacactttcagcactcttctcggctgtctccttcgtcttgccagcgacatccttagccttgccggccaagctggagccgccgcggctgagtggggctgcggagccagaggcagaaggcgcctgggatgcggcgtcgtcgggtggggagacggggcggcgctgctcggtgcgtctctttgacttcggggagggtgtctctgggatagactgctcgtcgacgtcgtcttcaattggttcgggggctttctgggagagtttgcggggtgtggcggtcttctttgtgaccttggggcttgcggtgacagtgctgggcttgctggctgcgctggagccggaggctttgcgggctttggcgggggttccggccttggagcccagctttgggggtgctttgttcacggcgggggaagacatgcttgtttcgggtttggatattttggtttcaagatgatttgttatacagaaatcaaaatccagtcggataattgcaaattggaatgcagttgtgtccgctaaaggcgtgggtatacttcgtaaaggcgtatgtgaaatataatgtacaaatcccgggaacaggtatagttcgggagtataatagttatgttgttgtttctagatgagacaaatagaataggaatgaatattgaatagaataaaccctggtacgattactggtgtttataagaagaggtcagtgattctgatatcatcgcaaaagtccatcatagctgtctacctagagactgtaaccaggcaggacacatgcagagcttactacgtcatggaccattgatatcataacgccttttcctataatcatttcttgaaatcccagttcgggggatcggcatagagctaatctacacgatgctcggttagggcgtgatacagtaggcgccgttagcatagcatcatcggcatcataaagcggggcaattagacgtgccaagcagatatttgtctgggaattggtcgatcgatgcgatacttccagggtaggctcacgaatcagaggcccgggactgtgatattgaggggaatgtggcttaatctgagttaaaacgagggtggaggtggagctccgtgctactccagcatggaagcatatacgtctgattcgttgcatgaatgactacaatatcgaatccatccataccatgttcctggccaggtacgtcaagtcccaaggttctagattatctggacagtaaaatatgcccaaagcaacatgattggtcagatagcagtgcatatccatggatattccccgaagccacgctatgccagatgtgggcgaacaaatcacaaagttctatcaggaaggccacatgtgcatatgtgaaagtcgcctccactgcctgtcactgttcttgtttcaggaaaaaatcaaaaaggtcaccagctgcacttcgaatcgcattacatcagaagtcatatgagaacccttgaacagtgcaactatccataactcgtttctccacgcgggcagttagtacaatataggaatcatttacaataagcatattttcaatgacgatgctcaaatatatttgcattcgccatattattcgcaagtcgtagattcagccctaaacaagagaaatcccaagtaaaaccggataatggtcggggtaggtccctgtcggaggtatgaggtatgatatcatttcaatctatttgggtggagagttcagccacacaagtcattggctgatatcatcgtgcaaattcaagaaatattgtttcaaagatccatggtattctctaaatggtaggcttgatatcttgtagttgcaatatactatactatattataactcgtgcaacggctactccgtctgtacatgaattctccggttatcaactaccgaaatcaagatttgcctccacacctcttggcgtctgtgcatttttctttttttggatcgatcgactctacggagtacattgaatgacattgtgctaatataccagacgatagcaaggttctggatataaattgcaagatacaagatgttctcatccaaatctgataccctattcttattttgtattctagagtctagaccaaccctccataatataaagaatgcttgtatttgctcatccaatctcaagatcactctatacttgacttccgatcgagatcgatcggtgtctcttcccgctggtacatcctgggcaagactttagtgttcgccaccgactattgcccgaaatggataggataaacagaatgcatggtactctagctacaacaacgtatgttcagaagttaaaataaattgatagttgctcatcatggacgctttattttgtacaaccaaaaataaactcgtagcattaccttggaaggtaactatggctgtgctactagttagttatggctgtgctgataaattatgtaatcagggtctgtggcgggccattttataactagttcgtggttcctcctgagaatgcattagaaaaaccaggatccccgcctcagggctcagatcaatcactgaagaagaagcttccaagattatccgcagaaagaccaccgtaccctcgcagtccgcagtttcattgacttcttcgggaaactgcctcgatccagctcgatattgctacatacgcagtctacacagatgaatacagtcgtcactcaaggctagaaggcttcaccactacatctccgcggaatatactccgtatccgcgaggtattcgtgtctcttggcggctccactccggcccgagctccgctagctaaacagcgaatctaaagtcgaacgttttctttgacgcacttcagactccatatggatcgcagaattatgtgcgatatagttgactatttacgttggcgatgacatacgaggtttgctttttgatactagagaagggagcgacagaagtatgtacgacaatatatattagacttgtgaattgttgaaataaaagatgagtagaactgaaatctccaacaagaaatgcaaagtcttctatgttccttgtaaagctttgaggcttgacatagatcaatgagaaagaaataacaggcagttcatagagacattcttaaatccttcagctaacagacgaggagcaacgtcgagatatcctggatcgcgctagatgtggcaattatttccgtaaccattgtatacgagcgttattttaagttggagaagctgctttaatttcagccactaggccctaattgaggccgttatccaaggcgcttgagacccactgcttgatagacgcggtcagctccggtatattaaacgcatttgattgttcgagctagtatagcttcctcgtatagaattaggctaagcatcgttagcgtcgcctaatctccaccattttaggttccaccagggaccaatgtcaccctgcccaggtacttggctatttcaagcttagcccttgtagtgtcgagatcgtttgaaactgccacacttactcctttcgttttttgttttctttctcatgtaaggttatttgttgtcatccgaattacatattctcacctttccttgtaatgtttgaaaagcggcgaggacatgattcacaagtggttcctctggctcacctgcctggccgggggtggagtcgaggcattgtcactccaccagcgggacaaaccagcaattgtcaagatcccagttcagcgcgtagagaacgttgccacccggcttcagaaacgaatatctacagtctcggcaccatttgaagttcaggtatggcttccttgctggagtctctacatagaatgactgaccccctttataggaggaaccagaatttgcaagattctttaggagatccaagttcgattggatacaagtagcgggtatctcgcgataaccgcgtccaactcaaactattgtgaatcgacaaacgaagaagcatacttcaacatcagtagcttctcaacgtatcaggtgctcgatcacgatttcaatgcgacatattatcaggaccatattctgacgggagacttcgcacacgagaaagtggcgatcaatggagccattatacccgccatggaactaggtgtcaactttggaatcgatggtgacaatgttcttggcctagaaaaccttgtgggccgagaatcagatgcccctgcgaggatcctccaggctttgatgaaaaccggtgacatcaaatcagccgcgtacagtctgtggatggatgactctattggaaccataggaagcattccctttggtggtgtcaacacggcaaagtacgtcggagaacatgcataccatgtctattccagctatcaacggcgtccaccatctccccgtagccctggtgacagggattgcaattcaagccggcggtgcctccaagaacacgacatccgatttacctttctacgtggctctggactcggcggtgtcatggacatatctcccagatggggttatcgaacagatctataaagacttgggtgcttagtattatggcgatgtcgggagactcaactgcaccgtgggacaaaaaggctataatgtgacatttacattcaccgatttcgatattagcatcccagtgagtgatttcatcctggggggtgatggcgaggtatgcattttcagcattgtacccagtggcggacaaaccgcagtgctaggtgctacgtttttgcagagcatctatgtggtctatgatttgtccaacaacgagatatccatagcgccgacaaacttcagttcgggtgaagacaacatcttggcaatcggcagtgggtcgagtgcgatctctgggggcggtgtctgtgtcggtcactgcatgtgccatagtcccaaccactgtcaccgaaccaaatccgatcagattttttccttctacctccgtttcaagtgcccagagtgccacttcgactagcaagggctgggcaatagctccgactggaagtcccaacagagttatggctggtcttattggtgcagggctcctaatcgtgctataatattatccgagaagggtgaatctgtcccagtcagtgattcaattcagggtgattgcgagtggccagatattcagccttgtacccgcaatgctaggtgatgtggtttttgtaatatacgtgagacattaaatgtgagggtaggtggtaagatagcaggacgcttctacattgtcagactctgttatgaatgatttaaattcatctcagtaaggggccgaggtcttatcagcttcctctgccactttcttggtctctaatgcgcctcaaaatataatgttctggggtcagcttgagccgcttatccgatgtcagtgctctacttaataagagaatagaaaagtacacatatcaaggtcatgtgagcgcaccgggtctagacagcgagccgggtaatcactgagtaatcaactagcccgatgaataagagagtctctagtatcctatagagaagatcgcatgatttgtatgagttaggtaaaccaacgaccaagtactatagtacaggagttgggagtaatgagtgcaggatcggtcctcatagggccgtacatgatcacatgacagatttctgggatctcactaggatagcccgtgaatatatcaattcgcaggtagaatgtatcaaggtgaaatctagcagcgaggtgggtcaaaatcaaacccgctcttgtggaagagcccaatcttccgtatggggctcacgccgccgagcgtgagctttcttccgctgccgtctctctggactgagtttcgccattggaattgcagaacatggccaggaaggtatctctatcaagatctccattgacaagcctacttttgtttttgacggacccaccgtgtaaatgatgctctctggtggaagacgaatcgtaagcgcgggcaacgtctccattaaagacctgagcagagtgatcgatgtcggtgtttgtataacagtgcttgatatggctgggagattggatattgtcggtaccatcgaaagaggtgctgttactttggcgatctaggggtggcgagatatgattagcaagggatgagatggttaagtgagcggacagagacaccttgatcatgacccggtggatgacctctgacgaaccccatggagcgaacttgctcatccgaaaaggaaaaggagcgcgtctcaagggaacggtcacgatcctgagtgtaggtggcgagaccccactcactatgacctagtggaagctctagggccgagtgagaggctccatgggcattcaccgaaggatgaggggccgataggtatgcttccatttcccgacttgagggaccggatgcttgagttgggcagatcggcatagcttatagtagcatgagcgactaagggtagtagaagaggaagaccgtgggaaaactaaagtgggcgcgacaagagccggggcagatggctcttaaagagcgtccatgacagggggtaacaatgcagtacgcagatatgccgataacgatctagtcgaatgcaggatgatcagatcacaagtggcggcaggtgcggatggtaatgagggtctgatcgcccaggcgattgggcgaaccaagcataggtattaaacgacggggcggtgaactcaatctgagaggcaatcgttacggggcttgacattagtaccggactgtatagatatcatagcagatgagaagattgacaggggaaagatttacccagtaaagcagacaggaaatttacaaggacagatatatctcgagattctgctgtcggtcgcgactttcttggggagtactgtacatacgagacactctcctcccagcaaccaaagaataaagcgcctgggaaaaagaatagcggacagccaaacacagcaagccactgctgcaattgaacagcctggatgcattagcccgccgtattcgcctacgcgccgaatcattgatcgtaggattgtctagcctccaaatcacttcgcattagcggctcttcgatcccatggaacgcagtgaacgctagttcgccttgcgccctccgttttccggagctatacagtaagcccggagcgatcaagagagtgcctgagaaccatgttgtggatcctggggtcggatatgacttccggaggcgggatctggaatgggcggttaatattcgaaatcggtcactaataatgcgtatatttgaccaagccgtctcctgagcgctcaaatccgagaaacccgcaaagacggccaaattcaggggccacgtattggtcatattttagtcaatttagttatattgttatattccttatattaatagcccattttagggcccacttttcattttgtaaatcagaccccacgttcagttcctagcatcatacccggccctaggatcagatccatggcatggtcccaaggcgcactattagtcgctagtcgctcttaaactacgaccgtgtatattcataaggacgtaacaacgacagccctttcaaaaagggcatagccggcacaccgaggttcgttctccggttcgagtttgataatttcgggtagaggctgaggagctataggtgaagttacgatacgagaatatcggtgaggtattaaaaatttatgatatccagggaatttagagacaatcgatcgaaatatactattcggtataacaaattttattctattactttatatcatctagagcaggaccaattgtattaattactttaggctgccctatcacaatagcatggcgcagaacctaaattaacgctaaaagattgagcgagaaaggcctaaggactgatactatgaggcatagtagagagctgtctcggggccgtcttcgggatgaaaagaggggttatcaggtctctcttggttctcagcggcttttgataggcccgagagacagatacataggacttttgtcatgcgcagtgacgcgaagttaggtactctctttgtcattggctactaatatagttatagttttgcggctgtctacgggaagcacataggaacacgggccagagcggacggcgattccgccttctcgcccggtctatggcgcacttaacttttttttcatctactacctatttcagcttgggctccatataatttttccaggctattccaggtacttacaaccatagtcgtccgcttagacttaagcaacatgggattcggttctagtagggtgtgtgaccaccgacgcatttatattcaatcataagcttgattctccaacgcttcgatgcattccctcgggtgcctatttgtatatgctacgagaacgagtgttccagggggcagcagtccaatcatattaaattgtagcttagctggaaggatcagtgcggcagtcgcgcgacttgggtgagaatcccaaggtgagaatatctttactatgtaactttagctctcggggttccatggccaatcataaactcgaattaaacgccttccatcccaaacatggaattgttaccaccatgctgtactcagattacatcaggcctttttgatgaaaggtttagaatatctcctattagcacaaatatagttgtagttgagtccagacatatgtgatgagtatgaaactgtaagacggtctggataaaccaaagccaaataaacctaatcaatcaagtggttccccggcgggccgtgtcttatgacccactttccaacgcattttcattagctaatatagcatgtccataactaactaactagttagacctcgttctgaccgatcacagcattttagtaggctgtgagtattgagccttggctaagccttgctttgataggaaatttttggacgaataatagttgctcttcatgtcggtcttgatatttcgaatatctggcagaaggggctattttatgagccattcgtttgcgccgaggtaatcaagagcagtactcggatttttcccgctaatattttctatcttgcatcgacttcattttattgcgagatattttgatcatgatccattctctctccagccacagaactccgaaaatcagccaatatgagtaccgagatggacgaacttagcaaatctttcggtgatctttcgctagtacaaacactggaaatgcttgtggagaggacaatcaaacctgcccttgcggtgcaaaaagaaatcgaacggattcttccaaccgatccttatcttgccgggccgagaagcttcgcgaaaaatataacttatcgaaaatgggcttacaaaattttcaaaaactgctctgcggggttcgcacattcccctggatcttgcttcaaaatccaatacatgaccatttggaatacaaggagatggtggcaaaaaccaaaactctactctggctcgaagtacagttgcaaaggcttgaaataaagcttgaagacatcatcatcgtggacttatttccaatgttgaccgttaaatgggtgaaaagtcaccccgatgagcgcaaaaaagcaattgatgaaatttttgcgctcacacttgattttatttacacgttcaagccgccggttatcctttcgtgccaatgtgttaatttccagggggcaaatgtctggccgtcactgaagcatgaggcggctgaaaagctacgatcatcgatacgaggtgccgaaaacaaacgagtatcagagttctcacacaaagaacatgttacccatattgtacatggcttccacccttctgcaatgcgccgtatgccccgcacgatacctggccgagcgacaaggctcgagcgagaagtcttgctgggtcggataatctcttctttattccaaccgtactcagtatggcgaaataattacatgctcgggaaccgccagagtattaagaaacgggctatcaacgtacacctgcgccaaatgaagaatgaacttgaccagatccatgaagagggacttgctatgggcatatcccaggagccagacatctcccccacacttgctgagtggaaagacatcgataatgcgttggatgagatgtcgaatcaactgtcactcaccaaaatctatgtatttatgacttctgagagcgctatcatctagccaaccggactgatccagcacatagtaatgaatgtgctgcttctcagatgaacgtgcgaagaacattggattttcttttattttctttgctattaaaaatatattttttaaaaagaagatatagaaagtactctaagagtatattacatatactatattatatagctttatatataaatttcaaaatgagaaagaagataaggataatactatctactactataagctaatatctataataccagaaaaatataactattgtaatggggaaactgcgccaccattgcatatgcgctactgtcgaaggaatggcatatttattccctgattcctatccatcggctccttcgccggtccttgatatgatccttgttttattatttgccattgtctattgatacattcgagaatattagagggctaacagtggatatattgacactgatagagtagattgcgtaaaagactaagcaaaaagctatggatttcaaaagacgacagaggaaaggggatggcagagccatgatgatatgaatacaggccagcaatagtcaaaactaaatgcatatggcgagaagtcagcaaatgctgttagaggagtacagcggagttatcagcatactctgacagaaaaagcaaagaactatcaaggaagatgcagagaaacggagtgattcagcctgagcttcatcgactcgacgacatctggcatattcaaagctactccgatgcggtttccctcgtggatcacatcagcaaatagtattcctgcaacatctctgtcggcagagatcacgaagctgccagaatcgccatcctccaggaaatcgccatccacacgagtgataacatattcttcggtgatatgggttgccattgatatttcagcgccatcgatttcatatcgtcgccctttccactgacagacgcttttcgcaccattacagatgcccccagtcacctccgtggtacgacctttcttgaagtagtactcatcagtctgtagttcaccaaactgtgtgatagagctgttaggccggggaagaaaggttgcagatccaccagacaggagattagtcgacgtgggcctctgcttctgcgggatgtcaggtactatgttcgggcggaagtaccgttgctgggcttcggttgtaagctcgacgaatgcccaatcaaggaaccgtttgccatggaccaatagtcctgatgcaaatctgactttgccgagaacgtatggcatagacttcacaacattttgtgtctggatcagactagcgtcggcgacgtcgaggtcctggagccgctgccgagaggcttctctgggttcttctccggcgagaagccgcagctcaatggtctcttcgatctgagccttctgggatgcgaggctttctctgtggtgctgaatatccgcgagtgtacggtctcggtccatctgggcgatagactcgatgatggttgcattttggtcgtcaggggggaaattggcggaaattccagtgcgatcaacctcatcgcggaagggagtgtgtgctgttggtctcacaacatggtagttagttagaaacccaaaatgggcccggtcgtcatatcttagttcaacaaaaccgcccagagttccaacattctgatcaccgctgattccaattgaatcacccatcgccaccaaatctctgtcatcaaaccgatctctgaatgagatggaaggatcatgtttcaggagattaagggttcccggcagaaactccacgtcaacaagcagagctgacaccttcaatgaaagttgtccgatgatccgggcccggatttcgtaccagttggccatgagtagtggctggacgaaaatcacaattccaggtcgcgccgagcgaatgtcagggccaccgacgttgaacgggcaaatcatttgccagttctcccccactgcagaactcatcgtttccacaatactgtgcttgagcgtgtgaaaggcggaaaccactgcacttgttgaggcaatgggatacagatgaggtggagagaagtggtctccgttgagaacctcgacgtgcacattcgtaagggaattcttatgaagcagcttgacaaggctgtctttgataggccctaagcggatgaaggttgacccatcacccgacaccgtaacgcgcagcaaaaagaaatagctgcctgtaactcgtgctttcagggtgtggtggaaagattctgtgggtatccggtgttgactgaggattgcgtcgatctcaggccgaagatgtcgtgttggattttcttctgcagtgagaaattcggtcttcatttccgagttgtcatgtccgtggaatgtgttgctccgaaaggggtctgtgcgataaaggaactcctccagcctcatttcaccttcattgtcctctgactccctcagaagccgacgcctcttccgcgggcttagcgggcctgaagaggcgggacttggaaactcgcggggcttgtaagtggacattctgatctgaaagaaaacaaatggatgaactgaatatttctgctgatgaagttgggagaggaaaaaaagagaaaagagaaaagagttgagtgggcttccaaggtgaattctagcttttcggaccgctcctcagtagggcgtaggcatgcgtccacaataccgccagatgacatgtagacatgtgagctgtttacccgttcagatgtcggcaacctcccgacattgattatcgtaccttgccgtctcaaatttcaatgacttctgaaatccgccgaggacgagttgccaagtaaggcaaaagtcagcacggacgattgcatgcagaccataacaccaaaccaaaatagaatccacgccttagggtccttaatagtctcttttaattagaccaccgagaaagatttttgtcaccaccgtcccgatcctgcgctatgcgtagagatagcacctgtctcgggcccattcggcatcagaaaaaaagataatgccaccccggctgcaagagttatcccaccatgaataatgaataatacgtgccagagggctatcgtgagtgatgtgttcttgctaatcccgtatatcagacaacagcctagtactcgagccagtccatttattgaaacctataacgcggtttgggcattattttcttgcttgcggtactatatactcgttattgtcataaatgctggggagatagtaccttcgctgggcccgagaagaaaacatacagcagcgaatccgccaaaggtttgaggtgcagccagacatatgtagatgatgccctagacaattctgtgcaagtaaacgctgtcagcatatgaaatgatatgacacgaaggccggatgaaaactcacacggtggtaccgacgaatttgtttgatagaagtcgactcattagataaataaaggggtactcagaaaccagttgcccaacgtagaaaatggagcttgaccatgagtattgcgagctggtcatgttgagatcttcgatcaagccgaagatgccagtataactcagactctacttgttaagatattggaggaaaaagatgaagcatatctatgtttgcctattagctagtgtatggctggaatgaaggacgagaaccaattaccaaaggcagaatgactgtgttaatcttgcgtaaaacgggtttctcttcctcggcagtgtaggagccccggagctcgaccaattcaccggtcattcgatcggactccttatttgcgatatccttgctgaaattgtctattgggataaatacctgacaaaggcggttcagtgcagtgatttcaggtcgattggagaccaaccattcactaaatatatacaaagggatgttttatatcagagacaatccccagatttccccttagctataaaagaggatccttatctccaatcaattcggtaaaagatcaccgtgtggagttggtcgtcagtcccataaagacggcaatctgcctgtcaacttgccgatgtagttagatccgatgatccccgcaatgctcaatcatgtcacctcttttaggaatatttaatctcttgatctcttgaatgaacagtatatcgcaatatctcatatcgcatcaattcatcatggcacagaacctccccagctccgatatcaaaccgtggacccgcccggcacccaagggatacaaattcaccaatgcccatattgttgatgtcgcgtcaggcacaatcatagaaaaccagacacttatcgccacggatgggaaaattacctatctaggccaagaatcatccgcaccaacagaactcgagaccgtggattgtcaaggcaaatatcttagtctaggcctgttcgatgtatatatccatttatatgcaatcttaggtttcagtgacttatctaaagccttcgaaaatctaaataactagttataggcacccacgctaaacaatgcccatagacccagggcgggtatgcccggcttacgtaaggcccatgggcactgcccaccgtaccgcccgtgggcgatgtcgcagtctaaatacttcacttctcctgtagttctagtttgcttgatagagcttggttatacaagtatataatattaattattaatagtcggaagtaataggagttatataaggtataaaccgatttttaagaagcaattgcaaatattgctagtatattaaagcaaagataaatatgtagcatattatagtaaactaatataggcctctcagtatattcatgagcaatcatatccatattaattaaaggaaaaaaatagcagctttattgctgtttacacagaacttatagtcattcattctattaagttccccaattttttctactgtgtgatacttcgtaccattcggtgccataagtatcggtcctgcatgctgttcatgaacaaatgtttaagcagcaatatagtagatgtttatggcacgaatttagccgacagtgtagctagtagagtccagcatgctcactccttgagaacaagggactaggttgaaaatggtatagcttatgttcaaatcagctcgctagtcatcgttttctgcatttgatcgaacaaaaaatccaagagagtaggtgtttcagaacgaatgctacgatccaataacagtcaactgccgctgagctgtgaaagtctgtgcggtggtcgagcgacggcgggtgatccccactcaggttatcaccctgtctatagcgcactcacccttgtcacccccggtcgcgcgactataaagcggcagtcacctgtttctcacccaggcggcacccacccgacttttgaccgcacataagccacacgccggcgggnnnnnnnnnnnnnnnnnnnnnnnnnnnnnnnnnnnnnnnnnnnnnnnnnnnnnnnnnnnnnnnnnnnnnnnnnnnnnnnnnnnnnnnnnnnnnnnnnnnnnnnnnnnnnnnnnnnnnnnnnnnnnnnnnnnnncgccggtgagttagtagttgggtgggtgaccaccagcgaatcctcactgttgtatgtttttgtttttgtttgtttagtatagcaataaatagtatgttcatcttaggccccattgtggaagtctataataaccttctggaaatgaagcttaacgagacataggatatatgacgctatgaccatctaggggcagaggtcacctgacctgatgttgacgatgagatataagccgtcttaccattccaccaacggtagtctatagttctcagccattatatgtttccctccagtgctatatcagacacatacgaccatagggtgtggaaaatagggcttcccgtccgctcagccgtactcaagccacatgttatatacagctaatactcaattcgcccttagtatataagtgttagagcaggtgggcctgacaccaccttgctagaatgggtacgtatctaataagccaacgacttaccaaaaagaccactataacaacccagatggttgttatgtcaggtttctaatttatataccctttttaccccactcttggtgcaccaaaccaatcagacccaatactagatccaccttacacagaggggttctaacaatataataacaggaggcctactagtactataagtataaaaaggccttctaagtgttacgattgacatgtttgcttgtttatttgtttgctgtttgcattgtttgtaaagtagtcagctataataacccctgcctcccactttacaacttgcttcttctttctctctctatcttagttattttgaatagagtactctttcattattataagaagtataaatctttcagtcgcgactttctcggccatcgtgaaatcatccaggcgacctttcgaggctggcagatcctttgggtcaaggagctcggcacccttcttgatgatttcctagtacacagtttcgtgaagccgcgattggatatgatatatggtaaggcttcctcacacgttcacagactagcaatacatacttcaagcttcatgatcaaaggtacattacaaaattgatataaaacatccctttttgatttgagtccaatgagaatatccagatatcttccgtagatgctctattcgacaggcgcaggactctctaagatggcctaaatagccaccaacttagtaatgaaacgtctttaaagctatccagtgttcttgttgtagagtttaattatgtatcgttattgcgatcaactgggataagggggaaattaaaattagcccccctccaaacacgcaagtttgtttgaggaaccccggttggatttcctgtttgtgagttagcgaatatatctcccattccttcggggaaaagcatgttcagcgctatatgataatgtaaccgaacagcgtataattattgcgaaagagctgttttcatcacttggtgtttagagttgcggaaatcgatcggattatgctgactcgcccctgtctcatcgtttttatcaatggtcaataggaatcttatcatggccagggattgttaagaggacaacaggcaagacgactacggccgaggactgttttcggtaattcccccgtcattgatcacataaaccttcgagaatgcaactcaacgggttgggggatagaatatcccaaatgtacatttttttacaccaagattttatgcaattgtgtcttcgatgctagtcaggcttgctggtcgaggttaggctcattctcagtagcaatcactcttccttcccatgctcctcctacgagacttatttaggtcgacgaaatatatggcatctgcctcacccattctaatgggaaggcttctgcttgctcgacaagccagatcgccatacacttcctggtaatcctcagcccagagcctttctgtccaacgtagccagcgcttggtttgccctcgtctccgtcagtaatggcgcccactcgatacacagtccattcgatatctttcccatggctctgaaatgtattcccgatttcaacaaactctttataagctggtcgaccaaaagcccatactaaccccgtcaatgccgctcgtgcaacagagcgctgatcctgttctgcgtacacactcactgtcgtcatcgcaaacacccgcctcacaccacattcccgcatcacgcgtagcagtagggtgtagaaggaagggaacacaccacgatacgtatcgttccatgatttgtatccaggacccgggggccctagggccgaaattatgacagcttggcctcgtactgcgccccgtaaggtctcttcatccgtgatactgccttcgattacctacttgccgcagcttgattagccgatgctttgaccatgagggagtaagcgtaattacctggactttgggtgcgagatcctgggatagtttcccggcattgcgcacgaacgctgtaacttgatgtccatttgtgatggccttgcgggtgatttgttccccacaagcaccagttgcacccaagatcaaaatcttcatgccgaagactaatacggtcgaagaggctcaagcgtatttgactttttgtaaattggaaattggcatgaaatgtaacataagtggccggaattggtaattgataagtgatggagcaatatattcaaggacgaggtaacgtgctcagacattcatatttatatcccaggcaattttggcggcagcgtagttaggtccactttacacctaccgaagacgggattaatagaagcacggccttaactccggtttggcccgtcttgtcagctacttgttattgttagtaacacccgtatggtattcttaattccttatcataagaactccgattgttacttctggacatacttgaacgggtctcctcttaaagccgccatagactctaatgctgacgtgtaccgggtttatcttaacgccgaattatgaccatcgatatatgtgataaaagaatttcattttttgccgctgtaaaccgcaccggaacttttatcatgtaggtagacatctccgcattcaccaagctgagcagagactggtttacgatttcaaaacgtcgttgagtaaggtatagaccaaggagaggtcaattaagtaattgacagcgctcaacgcccccttttttattttatttacggggctcggcgtatcttaccacagtggaaaggtaaatcagagagcagaaaaggatgtttagggttgctattattagggagaagatagtcaataagccaggggcttcggacagcttgggaagcaacttgcatccattctttctttgtcgggtgaatgcaaatgttcatattgtcacattctccggaacggaaggctcaagatgcgatcacccatatcagcgaacagcattttatgtgagtacctaacactgcaccgaattcattgcgatatgggctttcgcacgtcgtaaattagtaggcgagaatgaaaggttacggacggaaacacttgtggtacccttgatactctgcacgctcctgaaattcttaaggccgtcttaatgccgtcctagaaacccggccgtgacactccgtatccgaaacgatatgacgccgaaacttcctagacatgcggccagggcaagaagcaggcgctggctagctctttagatggttggggattgggttaggatagtgtcctttcccttgtcattgtggccttgtatgacaagtcgagacttttcgtaaggctttcacgacacagcctttacttctcgtaccatccgcgacttgaagatgcgctcgcctccgtggctcgtcgggtcgtacttctcaaagcgaaaaactccttggttaaagaggtcttcgatctccttggcgtccgaagcttcgaatggttcaccaggtgtcgtgatgactctattatttcttagcttgatcgccagttccaaatcgttcacctttttttcttgacaggaaggcggacgcggtcttgttcttggaacctctcgggcgtccacgtcggcggggctgaggggcctcgacgataggtggcggggggtcatgttgactgaccggctccgtggtatcttgcttaggcgcccggtggtagggtttcactgatgtagacctgaaacttgtgggaccgttcaccatatccactataatgtcgtgtccctcaatcgaaacaatcttgcacggaccttgtcatccttcgttctccctccaaataaatacttcactctgtaacgggagcgaaagaacctcggaggtagaggggccgtttcgggcatgaagcgcgtcgttaacccgtcgttcagcattggccttccgtagggcggtcatcgctttgttgatggcttcagctcattttgtagtcgaaggtgaaggcggtgattcggtcgtcatcctagggtaagcaccaaagactagcaaggtaggaaccaagccatctggtcccgctgtgttattaacagctttcattgccatttgaagtatagcctcatcacttgtgaatccactgagctctgctgacaggatttcccatgcacgcttgagtggtccatgagacttctcaaccttgccaatggaatggtgggtcaactgatacttattcttaaaacactctgcggcacataaaacggctcgcacaatagactttgtggaacggaaacatctgatacaggcgacaccaccaatcgctcgttccaggccaatagaattatagaaaggacctagatcgtacggtggctgcttgggatacgttcacagcacttgatttgctgagtaagagtccggggatgaatcagatgagcttgaggtcacggagcggagtcccgaagacgctagtactcaccattgcaaaccaccacgcttgaggaagcagagagcctcacccagctattcgaatacaagctgcctgactgggcgctgaggaacgataatcagcaatcgaggttggagtgaggatgacggagaacggggtctgatcttgccacaggaacaggctaggagctcgacgtggaggagcttacgcgggatgcgggaagagaggagatgtgggaggtggatggtacatgcatccacgcactctttgtagacctattgccttatggatatgtgttggagagtgtatcacgcgactgtgaccactccgccccaggacttcctgttagatagtttccatagtctctcgctcttccttttcctctccagagtccatcatcaatacagatgtattgtcatcatttctatcttccggcatcgtagctttctgtccctccgacaatatggcttctctactgtaccttgggttttgtaggttttatgttccgcttacatgtaataggtgctcccactcttcgagaaccaggaatgggatatagagttatgccaagcctgggtacccaccgtggcctgtttgggctttcttagaaggtactaagcctattttggaacgtcgatccggggaaccatctgcctgcacatgttgactggactacactcttccagcctcacttctcacttctcgcttctcacttctttgttcttcctttaaccttgtcttgccactttactcaaggtactcgatccgcaagctcttactttcttctcatttcttccttcagccttaactctccactttccttaagcactcgatctgcaaactcttactttcttcccttttctcaattgagtctccacttctttcacatcgagactttgaaaatgtcctctccaaccaagaagacgaagagcaaacgtggaagtctctccaatgtcttcgaaggacttgacatcaaacccgcctctccctatccacatccgccgtctactagaatcaaccttgccaagtccatccgccactacatgcaatcaactcttcgctttggacaaggaactgtttctcctcgcagtttaagtaaaatgcaatctcggtttacgatttgcatggacgaagcctacgattacaagattggcacacaagacttcgacccggacaccatttttcctgagattatcaccctcggcaatcaactctccgcccttttacaaaagcaactcacacccctgcaagaaagtgagttcgaaaatcacgtcctccattgccttgccactatagtgtacggatccaacatgatcgagcgcgctggaagcggttccaaaatcacactcaagctttgcatggcaatcttccgcggggaggaaataccagaggacattggagaaacggaggaagagttcttagagttaaaaaaagagcttctacgcaagaatatgccagcaaacgtctccgcagttttacgaagtcgccgtgaaatcgttcaacatgccaaggctgcctcgtatatgattagtcaactctgcgtttatgataaagatcttagtgaagagatcatcctccagactcataaaattcttacgcacaaagtcgacgctgaaagcactccctgggaagaatacagtggtgtctatcgtacggatgaagtttctgcgggcctccatccgtttcctcatcacagccttgtgccttacaaaatgaaagcaatggtccgcgaactccagtctgacatgagagaagtcattgctaagggaacgattgaccctatcgccattgcttcgaaatatactcacatctttatcaatattcatcctttcatcgacggcaatggacgtacgtgtcgtctgatcttgaactcgatactccttaagcttggcagttttcttgtatgcatcggcgagaaggaagaggaccgctccctttacatggaagtcgctagcaatggaggggcactggaggatatgtatggagatcttgatgacgaagagagaccagttatgcacagggagctaggaagttttgttatgtcacatgtcaaagagaggatgcgcaagctggtttctatgctttcgtaaagtctcttaggtctgacttcggaatatcaaaaatggagtttatttttctataagttgaggcttggccatctatggatgtagtgtatagactgcctatctcgtatatcaaggtatagagaggctaaaataaacacttgagattaggtggtactcccagagaattacacaccgcaatctgtcgtcagagataactaaagtgtctgaaagtaggttgtagcaccttgcccatatatccaccgttttgccgtcctaggaatatttgttattgtagtaattcaaggaggtgggtgtagcattgcctccttaccaaatcagcaaattgaaatcagaggagtatcttcgcggcctcgcgtattagagaatagacaagacgtgtccctaaagggctgaggcatgcaattacacactacgattctctttttccgaggaagaaagtcatactgtaaaaaaagtaggtgggtgacccgatataaatccgtcccactttgaaccttacagatatggtaagatgacctggcctctcgaatagttatccaagagaaagatctcgctgatttcataaagagctacccccgccgggggacgcatagatcatttataatcagagtaccggacgatatcaacgaacaaccagcgattgaattatcactactatatatgtctgtttgcaagaacgttctttgatcaaaacatggaagaacttgcctatacctaagaataaaccagcactacctttcctatcaagaatacaaagaagaaatcaagcctaatcgaggattctagctaagaagtgccgacttaagtaacaaaaatgaggttctttaatctggatgtataggagggtaataaattacatgggatacttaagtcatcagataaatagattttgacattcgctacgctttgacatccgatgggcgatcggaagccgggcaatacatattccggattgccaagagaggccaagaattagcggtcccattttgatattcgctcagctgacggccgatttatttgtcttggcaatgtttatctgatagatcatcccgtggtatccctagcataccactgaggagcactcgacgttcatatcacaatcaagcctgcggaatcatcgatcaatctatatgaagcgggcacgctcttgctccccagtccctctgcccccgaatcatagaaagatcgttcgtacggtcgctagccttacctctgatgctctccaggagcacgacgattctattcagcccctttctccattggctctatttgatatgtttcctcaacagatcgccagtctgtcggatgttccaatcatacctcctccttccacacgctcctcaacgatcgcgatcgagcagtccgtcccgaccgagtgatgtataatatcgcgccggctatcttcggcgcgcaaatattttcgtagataacgatatacctacaaatatctgttcttatgcagataagaaaatatttcgtgatttgatggacgatgctcatttgcaccagatggccgaaaagctgtggagcaaatccaagaaacttatcaagaaaccatcgggtgaagctgaatggacggaagccttacatacaggctgtgcgtaatcaaggcaagctattatatttctggtggaggaatcccgaattgaactattttagtgctaacttcttagcaagactggcgcgaagacctaaaaccaccagtatataaccctcaacctaccatcccacggaaacgaagtcagtcatatcgccttgtattcgaaatcgccgccagcgatagacactcttcgcatgcagctggatcagggcccccgttgccagctactcctgtgtccaaattgaaaaccccacgtccagatatatgcgttgggttgtcagatgagagcttggttaatgacctcgagcctaagaagggccgcagtgccgctagaagctttctactagacttgcaagataccactagtcttgtcagcgatccacacgtcacccctttgggccttcgtttcccatttttgatagtcgaggcaaaggctggttcgactggaggtaacctctaccaggcacagaaccaagctgcggtaggtggctcaacagctcttctgattttgcgaaacctttcggagctgaagtctgctcaaagtttggattgcaagagtcaaggaagttctcaggccagtattaggccaattgagagcttacccaacctcatatctcatatggtcttttctgttactacggagggcccaatttatgaactgtggcttcattttcagagactaagcgaagaaaacttctctatggtttgcatcggggcctggaggacgaccgtgaaagacgacactctgaatctcttacgctacctttgggcagttttgagatggggaaatggtgaactcagagatagcattgtgaatgctctcggggccttatagaatgagtacacaagtcagtagccaattcgcttttgtcaaccaatttgatgcatcatgacgataatatccccttttagcaattcaaaaattccatagcgaaagccatttgaatgaaaggtacatacgcgctcgaaatcagtttcacctccttactctcttccactctttcttgaacgcatgcctttggttacccctgacccacacagaccccaagtgttatgatcgcaagagggttttccttggatggtctgcagtgtacactctggcgtatggtgattctccattgcgtagcctgcgtagttcctgtggagtttaagtggtatgtgatatttgcaccgggatgtatgtgtaagcatgggcaaatcagaagggctgtagcgagtctacagggcgacaaaaccacaacaactaatcgaactgaagacatactagtatctcttttggggctgtgtgcagatgccaaggatcgaaacgtttcaggttcaacttgtaatccaatcatatcacgctctgtgtcactaggaggtcagtgcgggcgtcacgctatctagggtgattctcacccaccttggattcctgaaactcccgacatttgccagtcttccatttgccggagaaagtacgggggaaggagatctcgtcgccacttttcttcttcattggagaatccctgacctaaatcccccgagttgcataccatcggacccgtctcccgtggagcgaatggcagccaagcaggtgcgagcacaccaggcaacctattatgaccgaaatcttcggcaggtagcgcctgggcaatgcttcaacgcggcgattgaggatggtacaaacataatttttttgacgtttggtgacgacatggctgtatgtgaggagacggtgaattcaatcgcacgagcactccaagtcggccacgattctgatcgtgaccggccgtcgaaacgtcggtaggaattgagtataaatgtgaattgctattaggatccaaagatctggaattttgtcttatatagattacggccagtagacttgcggcctctgtggttactcagctagatgggcacgaagtcaatggatcgaaagctttggcagacctgggcattttcttgctaagtgtctcaatcgtctcaaaatttttaattggccctccagtcataaagtccgaccctaaggagtacaccatcggctgggtatgcgcggtcagtacggaacttacaatggcgaaaagttttcttgacgaagagcaccaatgaccagatcctctttcgcccgcggacaataataactacaattgtgacaggatgggaaagcacacggatattgttgccgtctgatccaatggggaaaacggtgtatcttcagcagcaagtgtcgcgagaaacatgttgcataatttcctaactttacagtaggatcggcctgatagtgggcatcggttgtgctgcaccaagttcaaaacacgatgttcgcttgagtgctgcaaagcgaccctttgcgactgggcagcgggggcgatcagcggtgactctgtatttgtggcctttgttgaatatcctacgccaaaaaaaccaagcgatgtattcgcctttctgcacagtgaaacgaccatgatcgatctgagtagcgaccccgggttccgcagtcatctcccgcgcgaaagtgacgcaatcaggaatcaggagcaatttcgattcatgtgagtccagtaagccattctcagtatgcttagctctaggcagacgaccattggtctgtttctgcggcagagttttgagcagcacttctaaacccgataagttacctttttcttgcccagatgatcaagatgcaaccagcgaccccacttgagctatcttccggattgcggagagcccccaccccctcccacatcgccccgctcagattctgggtggcaaatatggaccccggcgccgacctcttaagtctaatcaaatcactcggcccgggtgataaccatctttacatgccaaaagggttggcggaaagcccaaggcaaagctaattaaaagggacgattgggcagagatcagcatcgtgtctcgcattgtctcaaattcgggtgcaaaacgatcgagtcaattacaaagctacagcaccttccgtgctttcctttcttcatccctatctggctttctgttgacacccataaagcaagaaggcacgatgtcaccgtcccagaatgcaacaggtgtttttgggcagctcgcacgtgtcttagcgccagacaagcctcttaacgtgctgatcacgggtacgtagacgtccgaagacaatcggtgtgcgataattcagccagccattagcacccggatgtaggattgtgatgtaattggacgtagagcatgaatgcgttcgaacttgaatgacgcaaacacctcttaccgaaatttctcatgtcgcgctcataactcatactcgaaaaaaggtatataaatacccgaatctaccccttaaatgaatcttcttctacactcctcgctggcaatctactaaaacttgactctttaaaaactacactatggcaaaggttgggttttcgtgaattctgaaagtttcttttcattctaatcaatgcttgtttttcttatagtcagtaattatcatgtttgaggacccggactcgtgggaaaatgagagagaaaatgttgataggtaggcggaaagtccaacttgggatttcttgtttgctatggtgcggctgacacgtacatcaagcattttggacaaatacactggaacctcaggatatccttccaccagatctttgccccctattattgtcggtgcagagtgagtttgtccttcgtgttttgaaagaactatctaacgtagacaatgcagactcggtgaagaggccgtcgaggagttgaggagcctgagtggagtactggtgcggtgtccggatgaagaggaagattagttattgacgctcacttggctgcaacatggcaggccgatctttgtactaagatcgaacaccagaaaataaagatgccaatatcccgcttacgtagctcagggagtatttttttatcttttttatttcaattaaagtgattagtcatgacatctttgtgcctttcgttttaggctaggaaaccagcggcttcggacggttcgcttgggaaatacattaatatgacgaacgaccacctactatggttgataaagacctgatgatacggccatcgtggcatcaatgagcgattgtactaagcacaaactgggatagctgtgaacgtgatgcctattgaacgatgtcagaaaactgatgctcacagatttgcaaaatgaaagatattttcccaaataaggggaggcttctctaaagttcaaggattctagaatgatagtcaaaggaatcacaaaagtagtggttcgtatctactttcagtctttatttctatcttatttatataccattttatagtttgttgtgtcaatcatatcatatctcacagtctttccattctatgccttgatagcattattaaataagcatcaaatcaccattccagctgtaagctgtggaaattaatatacccccatgatatcatcacaatttccagctctttatgctctctcaataagtgctcggatttcttcgagatcaaacggagcaagatctacctcatcgccgccctgatagagaaccgtcaagggcatctcatctggactatgctggggatgaataaatccactatccacaatgacaaaatcaacctcctccccacgattttcatccgcctcgaagaacatagacataaattgcgactctagctccatccaaggagcccagtaatgcacaaccaccgactttgggctcttctgaattgcttcgaaaacttcaccagggctaaaagaagaattgagggttagtcgtataaggagagagttgaggaaagaagctggcgtactcttgcaggatttggactggcattttgagagtattaggcttgggcttggggctttgaattaaatcagattgagtcttgtgatttgggagaggggcgtaaggcttaacttatagacagacctgggcggcccagcgtccgttcccagcttagattttcagctgagctaaacgaaagatctgatcttccttctctacgtcatcaatgaaaattgtaacttgctgagatatcgacgaatttgatttcgaataactctggagtacgaaagtgctacacgggcagaaggtttgatcagcagtgttgacgatcttggcaagaattccctaaccaccccctaactacctgattgggaggcctgcagcatctagaaggggcacagctgcatgtgaaccatgaattcattggacggacgacccacagtttgtttgtcctagcggcgttcggctctcccgaggagatagtgatcgttctacccgagcgaatccgctgagttctgcagtgcataacgtagatataaaccgcacatcattccaagatatccgcatttcagctgaaattctggtcgccactttctttcaactcgaaccagcaatttttccgaagagacttagctcttgactaccgcacaaacaacaacttcgtgttcaacgttacctagttcctactcacaatatctgttcaagtcacttataatccagactttagccaaaactttccgattaactagttcagggctatctcgttaaacccatcttcactaagaggaccccggaaattgcacttccgctttctttattttttaggcatgggcaaacccatactttgccgaaatgccctttacctcaaactatttagatttttgattctttggtcgcattcacttcgtgaaactccgccctcaaaaaattggctagtgtggaaagtgggcttaagacatttggaatatcgagaaaggatcgtcggttaggcaaactccgagtttacagagtttatatcctcggccaacccttcacctttaggacaaactaaaatactatactcattctattcacagaattgaatatataaataacatggcggtgtcgcactagtaacaagtccactcactagaggtctccatgtacagcatatacatctttcctcaaaccttgacggcgatggttaatgtatctgatagtcatgaagccgtttacgaggctacttccgcccagctacgctcttccctcaaccaacccgccttaagtggccctcaaaatgcccccgcactgcgtctaacgaaccctcgtctagcgcggctggctccttgatcacggttagccggtggcgcgcccagagctgatcgttaggcgtaggattcgggttttctaagctgtactcgtggagatcttcgtagactcccgccttaatccacgaagtgaggatttcgattgctttgtggaaggggttcggagcagtaggttgtgcggtagacgacccagccccaggtctcttcgcgcatgtcctggagcatgcgactggaggtgcggttgaagtcgatagaccttatggtcgcttcgtcgagtcgaggcggtctaaacatgatggataattgttcaagagatttgtattaggaagagagagatcgagggtgtatgtgtttgagaaagatctggcagaatgagttaacagagcagaaaacactctagccgctgatatctcagtccaagacgctatttactaccgtgagtggcgttccttggttccaacgccccccacccgaagcactttgatgaagccttcgatactaggtagccataggcgttcagcaccgagacgtctaccccagaaacatgctccttgttcgtggaaacctagataggatggtttggattgacttcggcatcgcaacaaccttcaccaactttggacctgaacagctggcctattgtcagcacgaaattgcgctcatagagggacttggggaattactggtaagggctccgttgctgcccatgttagaagtattcggcgtgttaactgacgaatgtagagagaggaccaagctgagggactcccaccgaatacaaaattatattgagggctttataggcattcagtggttccgacacttctttatggcagctatgcggttcttgtaacagagatagatcggccgttggggattgtctaatgtcattatgagtgatgcaggtcatgtaacacgccaggtacttctagtaaagtgctgtcctgacttgagcagtgcaatttttccaacccaactgtgctcaccagtttcctttgactccggcctctaatcatatttactcgtaaagggatcatcatgcccttgggacgattagtgggtctcgactctcaatccgttccttcccgccggtccgggccgaacctaccacataccttaagcttaaagtaggggatgagccccaaattgggttacaaacaatgtaaacactctaattatgtatataatcctgcttggtttgcaggttcgtgaacaccaagaccctgatttatgcaaaaaccgggtcaaactgggtccagactgctttttgacgagggcattcattggaatttccatcaaaaggggactgaaaatacggcatctgtcaaaataatccatgagaattgccagtggctaagatgctaagagaaatatgtaatcacaacatccgtcaaatagaatggttaatccctggaattgaaattgacgctgcctgtcataggatagcgttgacagagaggtatcaaatggcccgcatgatccttccccgtcgctctcaacaatttaaaaagccacaatcatgacttagtccactgtctgatgaatgcagagcacgtcgacagcaacctgttctggttacgtacatcccagaaaatagccgcagtgccgccaatgagcatgactattgtaatctgcttcgggaaaatgccacgactgtgcttcttagcagatttcgccggctctgcatccatcgcaggtaatggaagatattccaaataaggccctcccctcgagaaactagcatacagcttagccttaatcctgtcactaacccagggaacgatgtgacgggccgcaaatttgagaacccaggtatcttgggcttcatagcgcgtaatctgaccggacagatcaacgaccgtttttgctcgaggctcctgaccagcgatatattgattgaaaacctcggtcaactgctgaagggatggcatggggttgtccttgagtaaaggcacgagaccgttggtcaaacgagcaataccttcataagccaggttaccacctaaaccaggattgattgtagcctgccgaattaagaaattagttaaatgattgaagttcggcgggagatcccaaaccttatgaactgagtcacccatcagaacaacccggttgtgactccactgtttgatgacaccttcctccaatggtaccattgtgcctttgactctagcatcccaaagatctttcacggtatactcagggcccactagagaactgccgtatttcaggattgttgcctctgcgtcttcatccgtgaatcgcgggcagttgggggttctcgtgcatttggagtccttgacaaaaagaaaccaaaaaacaagcccaggcacaccagcagctgcaattgctgagtatttatcgtaatacacgttgtggaccatcgcatcaggtaggaactgcttcccagcatcgttccgggagacagcaaagatgcagtcgtactcgcttgtaaaggctatattccagagactgtcagttagaatgggtttgggagtagcaaaacagataggctggactaaccctcgttgatttcattagcaagagcctgatcagtcacgctgattttgtcggccatcagctttctcactttgctatgaattccgtccgcgccgatcaggatgtgaccgtggtgctgcgtgccatcttcggtggtgacgataaccgtctgtggggtttcttcatacccaacgacagcagttcgagcatggagcttcgatttgtcttgaacatggttgtacagcacctccaatgctttgcatcgctccatgaagacaatgggacgttgaagactatgccccacaaagtcatggtattagcacatttctttcatcggccacttccatcaatcaatacggcaagtagtaaactatatatagacctacatttcattgatgtcgactagaacaagtgagtcctcaaagcaatggccgtttccatcataatgttttcgaacttgcagaggtataacctgtctctcaatatcctcccatactcctagctgctctagaattcttatggtatgcggatggattccgatagaggcgcccagttgtgttgcaaagtctcctctttcaaaaagctcatattcgattccggcgcgctcaaaagctagggctaggccgagacccacaagactcccaccagctatgaggaccttgaactgatttttgtcttgatcgaacgacgccatgagtagagatgcttagatgcaggagtgacaaataattacggcggaatattttgtgaatttgagttgcatagttataaataatatgtaggttgtccggagtaaacaacccctttatatttcccattccgaagggttattgtgcaaaaggtggagaagaagattcaatgggcgcacctaagaggtccgtgcaatcgtctatactaaaagtagtattcggtaactacgaattctagattttaccaaggcgaattgtgtgcttggtgaaacagattgatcccgtaaacgtgggcaggtggggttgcaaaggcgatgaatattcacagcccgggtttccgaatatacatatgccggtgcaaggtaagggaatgcgccgctagtccggtacattatttgttgcgagttaaagacaatcctattgtgcactctggtcattggattctgcttctaggtacatcatataggcagttgttctcttgatttttccgggaacttccgaaactgacaagcagcgctaacgactagctccaattactcacgtatcatgtagtgacccgctccattaaaggggggccgttgcaaaatggtgcactgttgtagatgatctggaatttttgatcttagtctgttgttactaccttaactgatggttactctgtgcactcgtcactctatggcttagaccaaaatcacttatgatgcagctattcagatacctcattctcaccgttaggatgtatctagacacggccccacattccatcccaccggtctaacggctatactcaacttggaggaatgaggcttgacaaggttcgtcggaaattattcaggatgcacaagtaaagttaattgtcagctcactagttgactattgtctagaatgagttaacaatagaattagaatttattgatctgcatatgcagcctgacagctccgtagtgcgcaaaagtaccagaagtttggaagaaaccagtcacatataggctttctcttttttccagctcacaaaacatgccttgcccggttttgactcggattcgcgtcgtctggctcttgaaatgttgaccgaacccatatgcaaagaggccttcaacttttctaatagctaccatgtctgcctctgtcgagccaattttgacagcagaagagcggcacctgcagtcgctcatctacggtctaatcattagcacgggaatcctgtctatgatagtctgcagcttacgagtaaggacctactggctcgtcaaacgcgagaacctgtagagtacggcacatgagctgattttgcctctagctttacacaagagcattcgtcatcaaaaattttgggatggatgatatcgctgtctgcgtggcattggtatgtccaaccttccattacagctatacaacagccatgacgactaacagtcttaattcttaggttatcacgcaggcctttaatgggctgggagttgctgtggtatattacggagaaggaatacattttaacaaggtgtctgctgaaaatcgagcaatctggctcaaggtatgattcaaacaaatcattcgctcccaaacatgttaacctgggtaatagctttattatgtggcaatgtgcctgtacctctacgcctccttatctgtcaaagtcagcttgctgctatttctacgacggatcttcatcaaacgtgagtctttcattacacaaaatccaagctaggatgacctggtgctgactccacgtccaggctggatgaatgctctcactataggcatgattgtcttccaagtcttgttctcggtctcgggttcattcgttctagccttccaatgtgaccctgtaaggtaaaggaatcccctctcaggatatctgaaagacatactaacaagagtaggggtgcctatgacttaacagtcgcgaatccgaaatgctactcgcagtacaaactctttcagatcacattataccaggccgttcttatcttcgtttgcgatgtcatcatcctgattgcgccactggttattctatgcggactacagatgcccacacggaaaatcatcgctttgatggcaatcttcggatcaggttcgcacacaccccgttatatctgggccggtaaatgctaactctgactgcaggtataatcgcctgtatctcccccgttgttcgcttcagcacattggattatctgcgccatggcactacggatctgacctgtgagtgcacgctccttccaaatctggctctttactcgctgtatgtctgacgctgaccattacccacagacgactcggcatcatcactatactggatggccattgagttcaatttgggccttgtcgcaggctctctttcttctctaagggcattgtctgtttttcgccgattcggctcgagcgcaaactcgcgagacaagggatcgaccggcaataaatctcacgagcttctcaatatgaatggtagtgagcccagaaataccagggaaaggaagagagggttggggatggggacaacaatactgcaggatagtgttaacgagagccaggagcacattatatatgagccgaaaaatgaccacggacagcgagaggcaaggttttgatcttaattaaaaattcgacgcattttaaaatcaatatgctattttggatctttggtgcttgttaatatttcgtgacagatgaccttcctcttttctcgaccgtgccagagacggtttgggtatcaccttatagccgtatggctgttctagagcgtatacggagacagattgtgcaatatgatagatccaaatctacaaaacaatccagttaacattcactggcttacgcctgggcagatattccccatcttccaccaaggtcagcaaatggagattcccgattttgatcatcttctccggctgcgaagagtgcccactaccagcggccatcagcaacaaaccgtgccattgtccgggtcggtaccggagatgaatagcatagtacgtcccatgcactccgtagatctccgggatgagctgtttaatccagtaccggagatccccatgatacatgctcccttggggttggaagtgctcccgttcaacaatatgttcaggcaccgacagactcaaatcgacaaagcatgtcatgtgcttgatatcgccatactcgctatcggatgagaagaggatctctacctccggtaggaacaccgccccgtcgccgcgaacctcccacgtcgatacggacggatggtccgccatctccaagcgcggcacatacaggcgtcgcgcctcggagatccgggcccggaaggggagcatagtgccccggactgtgtcctgagttttcacatcgtcgacggacgggtaatccgccagaacggcggtgatgaagaagctagagcccagattgcgcgcgacctcctgcacgaaggcgagtgggtactggtcgaagacgaagcccggtttgttgggctggcgctgctccggcatggcagtggcggaggtataccattcggtcatgccgaggacggacatgatcgcctgcgcacggctgtggctacagtaacggctggtcgctaagaagaggatctgctcgcgcttgagctcgtggaggttgttcattcctgtgcggtggaggaggtcgagtacttcgtggtatcctgggtgaacaagtggcttccagcgttcgagaaggtggtctgctggggtagttagatcgttaagtaccctaatgagtgtgtccttgactcgtccggcgagggagacgagcgtgttgaaggcgacgagggccccgttgtcgcctatcgtgaggagttcgaggttcttgttgcagatccagatgtcagggcgcagacacacttcctgcagcgtccacagggagctgaaccagggcagggtggtcatgtccagtgagaacagccccgtggcccggatctggtcgtgcgctttccacggcgggatacgtatgggagactcgtccccacttgagaactggaggtccagatatacggaggacatccactggatagcgctgcgcatgccgtcccaggactccggggcggaatcggtattccaccaggcgatggcgtgtttagcgctcttgaagatggatgcctggcacgcaacctccatgtacatggcctgccgaagctcctcgtcaagctcctccccacagccctcctgcggaatgcacaccagatcaaaccagatatagggtgtatccgtgggaatctgcgccaggatatctggtagtcgctcgacatcaaacagtgagttccgagggatcagccacggcacgtgcggtttcatgtcaaccccaggctgatcacgctgccgccaccggccccaggtgtgactgatggctgtgtatgggatctcgaaatcgtattcgtcccacagcgaaaggacctccacggtcctccgctctttcacatcccacaagtaaagcgggaacccgcagatctctcccagccaggggcaggagtcgatactggagccggcgctgcagcgaggatccttcccaggtagatcgctgctccccagaacccgtctccctgcgcgccagaccggggaactctccgaccggtgagcgagataactccccccatctggggagtatggcacttgagctggctgttgggtgtggcttcgcggagagcaagcttcaatcgcaatggttagacaagcagcttcctgcgccatgtcccgccggaggctcaccaactcgttgccgcttcggtgtattacgaagttcccgaattcagcgttgaacagcgttgacatgcactggttgtaaacgcagttgaagcggaatttgtaccggatcccactggcctggtggatcgtctcgcgctctacatggttttgtgagtagaagtgagactcgtcgtcgccaaagaggtcgtcgtcattatcatcgtattctgcttctgcttcatccacaatacatattcgggaacatgttgcccaccatttccagagaatgtaaaacgatcgtacctgccccggggtaagatgttgtcgcagttcttcagcacgatcatcattaaaccccgtgatgaccgtgccgtcggggctttttatactgtcgactgcgccctgctccagagctagtcgatacatgatcgagaaacacctgctatacccgtctcccatgcccatgtcctcgccgtagaccacctgcatcaacgtggcgaggggatatcccttgtccctctcggggctgcgcacgggcacccagtcatcggggctcatgctgttatgctgaattttctgtctaatacaagtgtagataatagcaagacgctggtagtagtgtttattcgtaaagacgagcgacgaggtcagaagcggggttataatagaaaactaagcgaacccactgttctgctattggctgtgcttctgctagtacgagatcaaatttattgatgcagatggaacgaatataagaaagaaaaaaaaggctaattctcagttgcactcgagacatcactccagccaaaccaacgactaccggctcaccaagcgctccaagcaatccctcccctcctgatgccgcgcgtgatatgtcgcaataagactaactttcaccgtctcagccccatgtctcttctccccaaaaagaatcgccggccgatccgccagataatcagcgaccttagattccgtgttcgtgttccgtccaaacgacgtgtagcggacgatatgcatcgtcaggacaatgtatatctggtagcaggtccacgcgtactgaaccagcggcggcatccagagagtcgaggccagcaatcctagcggaaatagagcagcgaaaagcgctataatgctcagctggagaatctcccggggtcggttccggactgggtggccgtagtgtcggaagaactgctgcacgagggctgggagacctgtgaatagcatgaggtcgccgccctgagattggggggactgcaggacgaaatcacgaggtggttcagcttcggtggtcggcgtggttgatggcgatgaggtggaggatgagacaggggtgaggggctcgtggtcgagggcgaagaaggcgctcaggaggcggagcagcagcggggctagccaaatgagacaccagagtgatcggccgatggcgtagacgacggcaaagagaatgatgccggagagctccgcgattaagatgctgaggtaaacgtgccagcctggtcggccgcagttctcgcgcacaaaagccatctgcgaggctttatcttctgccgttgctggagtgaagatgaggtggtagacggcgactttcgctcgtaaggggatgcggccattgtcggtgggcgggaggatacccttctcgatggcagcgtccgtggctggaggggatagtcctgccagtgatccaggtttttcggcgggtataggcatgtaatgaagagctcgcgcccacatgcagttacgagctgcgcggggctcggaagtagctgtaccgcaaatggtgtaggtccagtctgtttgctcaaagaacgaagtgcccagcatgtggccttcgtgggcgcccttcaagagacctcgggcgttggcgatatcgaaggtgctcagagcggctttgtgcaaaggaccccccatgggcatcagaagagccagggttgggatggatcgaagtgtgatgtgggagaatgatcgctggggccataataaggacgaaaaccagatttcggtggctgcctctgctccgatataaccaagcaccgcaccaaaagcgccaagaaccccaccttggtcggacatatcgccaagcgagatgatttctggtagcaaagggttgtggtcagatagaactcacttcttttgtccagatggccggacctgtcatggcaatggacagatctgatgacatggccgagttttgagttggccggagacctgctgagctggctagttgagtcggtcagcgttgtcacgctgatctaggcttacatgatattcagccgcaagatggggttgtccaaaaacccagctggccaagggttattccattatggctatattgttttggaagtgttcatgtggaatccgtcttccgatttatcatgtcccttgaatcggggaatgacagtaaatcagtcaacatcatccatgggtgccggtttggttcgggtccaaaagctttccaagacgggattaacactacctagcaggaaggccacttcatagcttaagtcccaagcgagctgggcgaattgatacctgtcagaatcctatgccttcgaaccagattatcaactattcctaatattgcagggtctccagagtaggatgactaagcagtcatgtgataactataaaagcactccggaggcatagatagtaacgcagacacctttccaccttttcattctcagtaccttatggtgttctactctctagcaccctaatactcccagtgacgactctactctcacacctgttttgcacgcagggctgtcctgtccccgtgacagggtcccctctttactatactagggccaaaggtcacctgacccaatggtgacaataagaaataaaccgtcttgccatcccaccacggctatagttcataatcctcagttgcactatcttcccctctgttgccaatcaggtacatacgaccatagggtgtggaaaacagggcttcccgtccgctcagccgtacttaagccacacgccggtgagttagtagttgggtgggtgaccaccagcgaatcctcactgttgtatgttttttttttttttatttgttggcatatgtgtgaagtacagcaatagcatgctcatcttgggtcctgctgtggccctctgtacggagttatctttaagaaatcacgtattttaccaccgcggggtatcaatgactaaaagccgagctcttgtaatatgggtgtagacaagaaatgaagatccgatgtctttctgtatgataaatctcatttacaaagtaattaatgctgtctttaaaagcaacaagcattgttacatagtggtcacatatttcctcggaagaaacgaatttattggtccatttctagtggcaagtggggctattgcctcaatcctcaggcgcctaccttccgttttcgggtagcggccgttcgaagtacaacgactgccaatatgatattttggtttccatatcttttgtgagagaaatgagaggggagaagagtgtgcgcatgaaaataatttactcatcgttgattgggggataaaaagagtgtggagaagaggaaacgaaatgaagaggtaaagccacgatgttttgggaaaggagaaaaccaaaaagatgacagttaacgcggaaaatgaataatggagatggaattgaagtgaaagggaagaaaagcgaagaaaggaatagcctcaaagatcatgagaattggatttggggggggggaaagaggtgggaacaacttcaaatcctgttgaggaatgaagaggaaggtcacggggaaagcgcaagaaacttggaaatagcttcaaccgtgagccataggattgggaattgatgtgggagttacctcagaaaggcagggatagcctcaagaatgggaaatagacacaattacatcggaactctgaatagcttcatgattacccaactgagaagaacaagattcagccaatcaaataactagaaagattcaaaaaggctctgttatgatgaacaggccgggcagttatttcaccccaagccccacgtagctcagtggaatatgaccgttggtgcagtctctgggcccaaggctgtaccttccgttgaccgccagaacctgtgagagcgtgcgttcgagccagggcgagttctcaaagaaaaaaggaatcctaacaggtgttggcccgcctggtcccttcgtttggggtaggaccgagtcgagattcgctaacaacgcacgtgtatatatcccgttaagcggttggtttagacgagtagatctgcctatcacttgtgacacaaaattggggaaggccaccattttttttctcttttttaaggaagcaaatgaagttgtattgattctctcgcgaacccacagacccgcttccccggattttgtaatctccccccgtgtaccaacgaatcgtgccactacgacaatgggactttttctctaaaccatctcttactaataataagctgttccaacctggttccaagacctttggccgctctgccccttcgcagtacgtgtgaacatctaccttcatccatgttagcccgcgactttggtaacccctgtcgatcccctgccactacccttccgttttcgggtagcggccgttcgaagtacaacgactgccaatatgatattttggtttccatatcttttgtgagagaaatgagaggggagaagagtgtgcgcatgaaaataatttactcatcgttgattgggggataaaaagagtgtggagaagaggaaacgaaatgaagaggtaaagccacgatgttttgggaaaggagaaaaccaaaaagatgacagttaacgcggaaaatgaataatggagatggaattgaagtgaaagggaagaaaagcgaagaaaggaatagcctcaaagatcatgagaattggatttggggggggggaaagaggtgggaacaacttcaaatcctgttgaggaatgaagaggaaggtcacggggaaagcgcaagaaacttggaaatagcttcaaccgtgagccataggattgggaattgatgtgggagttacctcagaaaggcagggatagcctcaagaatgggaaatagacacaattacatcggaactctgaatagcttcatgattacccaactgagaagaacaagattcagccaatcaaataactagaaagattcaaaaaggctctgttatgatgaacaggccgggcagttatttcaccccaagccccacttagctcagtggaatatgaccgttggtgcagtctctaggcccaaggctgtaccttccgttgaccgccagaacttgagagagcgtgcgttcgagccagggcgagttctcaaagaacaaaggaatcctaacaggtgttggcccgcctggtcccttcgtttggggtaggaccgagtcgagattcgctaacaacgcacgtgtatatatcccgttaagcggttggtttggacgagtagatctgcctatcactcgtgacacaaaattggggaaggccaccattttttttcttttttagagaagaaaatgaagttgtattgattctatcgtaaacccacagacccgcttccccagatttaaattcccccactgcacaaagtttccgaattattatgcttaacaagagcctcaatgtcctcgtttatcttattatagccaaaagccagtatatatatctttctcttcaatcccaatgacaaccaagtcccttccggtaccataaccgaggacaagagtggctttgactttaggtatcttttatacggaccttgcatacaaaatgtacttgcttccttgtccgaaatacctgttttaaaaaaagtaccagttaaaagccagcttaatagaaaatattcaccttgatttgttctggatgaccaacatttcctttgttgactgtgtatttattgtattgttgaaatgagtatacatacccaaggcagaccgatttgggaaggaacgctgtagagagcacctggcccacgtgaattgtgctctctctttcctcttcctcttcctctctccctgatcatctttgtcttttgtccccagcttcaaatcaacgagacatcagatctgccctctcgttgcaaaataactctcctgtcccctgtacattttccgtcctcattgaggttcgaattgtatctcggctgtttccctcctgtctcccaagcatcaccatcccgacttacgtcgccttttacggcctcagtgaggatcgttatctcattttcggttgataacagtaaggtctcttggcacgtttatcctcactgtttggtttactgaatattgaaatagaaatgacatccgctcccaacgtcccggatttctttcgccgtcctcttggagctgattagcccaaggagttgcataaacaactcaaaaaaaaccgccattgcatgattagcattagagaaaacaacgaatacatccctgccgcattgagaattcgctttaactcccagcaaccatggctagattttcaaattgacaaggcgcacgtcgttttccccgccacatggacagacatgaagttggtcctcaagggtacctccattcagtacgataccttcattcatacacgccagcagtctgcaatagaagggaagaaagattatcaagcgtgcttttttgagttaagcccgtctgctagtcctgtattcgctggtcctttctgggagttaaaccacgaccaatcagtgcgatagagcaaactccaggacattgagtggcccggaaagaaagtttatatctcgattgcatttccaaacaactgctttaatgaattctagaatatacaggcctacatggccaagctggtagagcttgtgcgcagaaatcttcacacagacggcaaactacgttcgttttggtacgctgaacagaaccctcttccagaaggggaaaaagcaccacgcaggcccaagatgccctagctcttcgataatgatagccaataccatgcgtgggacacctctgtcgacttctacctggatgatcaggaccgccgttcgcgactactggaagccgcaatcgtagaacaacatattgagtgatctatctacaatgatgttttctgtaagggcaagactcacgatgtcatattcgagcgtgttgggccaagggagattcactggaaactccatgtctggatgtataccaatcaaaaagctagccccacctgaagccacccgagtggagtataaggtcgacatctcaagtccgattcatcgaaaaaaccaaaagctggtcactggcgacggactttgcatacgctctagccgtgcagacttcgctatcttgactcgagcgcacttcgaccctgctttagacggccagaccaggaagattatggctactgtcacaataaatttgaatggagtgggtcggcaaggagaccgtggaaaggcctcctcctggtatggactgtaagctcctgagccctcggttatatgttcttgatgaatttgaggccatcgagtagtcatctgcgcgattaattggtccgtctcttgtgtcttctggatctcggaagtcggttcgggacgatctatcccaaaacgttccaaattatcttcacggcgaagggattcctctcgagtcacttgtttttcagattcttctatatgatgggatggcggaccattcgcaaggtgtagcttacacctcaggccaaaggggtggcacgacatagtaggttcggcccgggccgacgggaaagagaatgcgcatctagacccactaatctgaaattttggtaccgccttccagattgggtgtgaccatggactttgccatgatttctgccttcttctggcttacatagtgaataaatatccaatttgatcagaaaaaaaaaacacatattctccctggttcagatgtttcgaagtgcacgctgactctctgggcctgtgtaaggatgggctttcaatgcgtttcaccggtcttcaaagtgagcgagtagtattccagtccttccagtccacgagtactcccattcattattctgagcactaaaggtgaagtgctcgatttgctagactgaagagagtctagcgatggacttatagcgctagatagaacttggaatattgtgcttgcgaataccaagccacatccagccggtactctgtgatataccccaggcattagaagtaccttgatttaaattcttcttcggtaccagcagccgtaacggcattactgttcagctcaggagtaatgacccatcttctagagtagcaagcagtagtaaccagggtgaaaggggcacctggctcaaggatacctttcagagtaataatactcagacccctcgaccgtttactactatctaggagaaggtggtagtttgggaatccgtggcagaagatcagaagcaggagtgacgcttcggttcttttagctaactccgatgctcgcttcgcctcgtaaaggaatcgctcgatcatatcacttgaacgaacgacaattatatcggtcaagtgattctggtatggcatctcaccatcaaggcagattctgcgcaccttgtacaggttgctatgtaggtagggagcgtatctctgcaccggcttctctgggacggctgctgtgagccacgtctgtccctagcggttgcctttcagaagacggttgaatgcatagaaatcggagataaaccacccgtctttgcatgggtttacgctgcccatggatggatgggtagcggcgaggacgattgtatccttgtaaatacaaggcaatgttgatgatgtgaattttgaaggcagctttcctgggattgtatgtgatctccctcgaccaaaggctctttctgcgccgaagacgccattatttagtgatatgaagttcgtaactcagagaagacggactatatatttgggttgggcgggaggtggtggttaaggtagggccataaggccaatggacaagagtttcgttgatggttacagttttatttgccatcatcttgatattgttgttgatttgaaaaacatcggggtggggagcaatgccgaacaccagaggagaagtttgatagacggagacgaatagagagcaggatacgctggttctttgaccgatcattgttgttgttgagtgggatatgaggcaacattcgaagttagggagggtataatgatgaaatataggattgaaaagtgagagaccaggtaactgtgaaagagaagtaaaaaattgaatgaaaagtgaaagaaaagtaaaagagaagtgaaggggagacttaagagcaacctgcccactgatgacctgaaatgaccagcatcggatctcgagactcaagtagcttagagctataacggcgaagggaaagagaaagaaccatgattgagctaggcagatgtgaggaggagggagaccgtgtgcgagtagaagtttgcaggtagaacatacacttgataaaggcgacgtctcggaataggtcgaccgagagactgtggaaagagccttcgattccttatcgaagttttcagtttccgttgttctcactattatcaaaatgtaataatgagtatgttcctgtgctcattccaaaagctggttgcatatctcgccggaatcttgagggtgagcgtatcggtccggcatttccttcgcgacaccactgccgagatatgctgaaaacttgcattcgggccgatgatagcagtttaaggttaaatacccggatcacgtcacctgattctgactgtcaggactcatatcttcctttctctccttcttctcccctatacacacttagctagcagaatatagttcattgtattactcgctcttctcctagcctcacagcaaatagtaagacaccgttgcctttttgagtaacacctgaattgccgacgctagagaacgaagcgaggtacccactgccatctcaagtagtagttaaggcaagagtggattactaaatttctactagcagagatcgccaatcatttcaaagtcgcgattggccgcttcaccccctccccgtatgcatcttccaatgaaaagatggctatgactagtgctctagcaggcaactccttgtcatttagttcagtacctgggggaaatgtggaagtggaaataatgagtagttactttgtgtaccttagataagcatcgatttaaaatgagtcgtaaattccccatggggaaagagttctccagtgattccactaccaatgcttgatcgcgactgagatgcgcacgcggtcgaaacgaaccttcgggttcgatgtcggggttctcaaagtggatccgaagtgactaatacatgtagttagccccgattatatttgattggtcgaaggagcttccccttttactctagttgtggcttagctcgacatgttaacctataaaacactttcggggctgagacatcaagtgcatcctcagggggctgacatggggaccgggtgctaaagatcgtatgagctagtatcagagtaatcttaaatcttcctcctttcaattaaaacccagtcattccctcactctccacacctccacattcttcacaaaaatttcaaacccatcactccatactcctcaccaaaatgacattcctcaagacccttcttctggcggcgaccctgtcagtcgcttcaaccgccgaaaccacctgcccagcaggctggctcctaaacacctggaccgtcacaagatgctgctcaggcaccatggtcgtcgacgagcaaggcgcatactgctgcgtcactgacatgagagcttacaaagaagcactcaccaacacagccttgctctacgagacggccaccacgaccagcgacaccaactggtccacggtagaaaattcttgcgtggcggaggtccgcttcacggctaccgactactcggcccaggtctcgtcggcggcgagcaaggctgaggctactactaccaatgattcaacgagcgaggtaacctcaacgagcactacggcttctggtgctagctctggtgcaggatcgcagacttcgacctcgattccgactgcgacttcgactgcgacttcaggttcggcttctacttcaactccgacttccacttcgactacgacttcgacctcgaacgcggctatgccacttgttaccggtgaagggcttgtgctcggtggtgcggcattcgctgctgcccttttcatgctgtgatgaaatgtgatttttttgtgattgaggcccccattttagtttcagtactatatatgtacgatttcgaactgaacttaatagtacacacgagactagattgcatgcacgttgatcgtatttactgtaatgacctcaggccgccagtcgggttcctcaggcacactactcagccgactatatacgcctagagtagtgcccaacagtattgaaatagtagaaaatgaattcaaaagccgtcagatctctccgtagcatagcagatattgcttgattcaatttccatacctgtagataaccccagttgtcctcaattgttgaatttatactccgtactccgcaataaagacagaaatactgacaaaaacaccgaattcctttggttggaaatgactgaatgcagccagaattgaacagcagtctcgactagcttcatgcttagtgacgtatgaatccttccactcaatagaccctattagtgcctttttacagcccatatctgatctcatttttcaagttatacgccttcgtgcattctgagtgcctttttgcaaagtactgtttcctaatcctgagctgaatctgatatacactggtttctattcattacgtttcaatgaactctaggactgttggataccttatgtatcttcctacatatacctatgaagttcagcaatataataaaatatcattgatcttactatacctgtatcaaagctacggagtgggtccagggagtcagggactcgggtgatcgacaacatacgatggccctacaacgcatggacccgtgcggctagccttagaaatgtggaatataggaagtaatccagttattgcttgtgattactatcctgctgcctagagatgacttgaaaataaattagtggcgccccctgaaccctctggtaccacacagagctttaaacccctgctagttctatcaaagaggtgcttccttacctaactccgcctctcatcctcattgctacacccagaccgatctatttacccctttaagatgcatcgtcttcgcgactccctgttaagcccctcgccaaaaggcttccccgacatcggcgagtcagatagcatctcttatgatcggctgaatgtgcggaaaagcctcgctcggggcgaaacccaatagatgcgcggaacagcccggttcaatcgaacctggattgtcacctccagatactgccaagttggagatggggtggattccctcgaactctacgttcgtcatatctggtatatgtactaccagctcggtctatatacgtcgcatgagacccccgaacacgaccgtctagtcctcgatatcctccggattcaaggaaagggaccgttgaccaggcctggaaagggggtctacggaatcgacatcgcccggatgaccgaaggcacgctgtgaaatgacctaccgctcttagtcggtgatatgactgactcttggatcaacgactgcggagcaatgtcgggcatccatctcctcaacttttcttctttcttggccaagttggcgttcacctgcgtctgcaaggatagaatgtgccaggtcgctctcgtcctatttcggcgcacgtttgaggagagacaggtgcttcgcagttctggtgatcctggtgatcctgatgatgaggatccacaccggagcatggattcactggagattaggcatttgttgccatctgccactgcgtggctccgggaggcagattgcaatatcctgcaactctcggaggtctcgtggaatgattgtcccagcgcgattggtaagggtggccgctgttttatcgagtcgaagctcgggaagcggtcgccgactggattcacgccatggagatggttgttctgactcaagcgaccccgcgaaattcaggaggcggcaaaagaggccaacgagaaaactctggaggaatctgctaccgatgccatccacgctatggtaagggtcgcggagaaacgaaactctgacattctgagagtttatcaaactgccggggatctcatctacaaggatgaaaatttcctgccattgaaaaagattgtggaggggaaatacccctggcgcgaggaaaccgaagacggggaagagaccgaagatcacgagcggggagaagacagcggggagagcaaaatgccggaagtgagtgaaaaggaagaggagaacgcaaatggcaattaaatgacactctctgcctctttctttgtgtttttagccctaccccgaccttgtgaagttggatcaaccttctcggctattcatattgaaactaaacagccgatagaaaggaacctggtagtctgtgagcgcagcgagctaccattgggacagctgttttatgttcagccaacaactgcgcatcgattaagatgagttccagaataattggagtgtacaatgaacgtgacttacgaggagattgaggtcgtaagcaagtgggagaaccgaaccctgtcgtcactattcaagtccattcacacaatcaccccaacccgcgggccgtatcaacaccggaattccaaagtctatgggaatttaataagaaaggagttgatgtgtctgagctttcgagattcgtccactatgaactagaccgcgagcttcgatagctcgaagaaaaagaggatagtggtagataggtgcggctgaaattgtgagtcatgtgatcatgtttgtgtagaattctgccttttcctctctactatttgtctcctattctcgtcataatcaacacagttatactgctctcgttctcctagatttacgttctcatagactcttcggccccccatccagacccacttgagcggcacaatccagatcacgtgcccgaagatcatccaaccccacacactttcttctactacactcatctctcgcatcacccaatagccaactataacccgattccttcctatcaacacacacaaaaatgcttcgacgcccacgtgaagcccagcctgatgccataacctccgaaatcggagcgatccttgcacccctggatatctttccatggggaccgcttgcaatgaactaccttggcgttccgattgtactaggagtaagttgccttatcactggtctgcgattcaaccatccgctaatgcactcttgtagacagctatgatcgccgtacacgataaggactatcagacagcatgccagaagctacaagagtccgaattccataaaacagtccctgaccgcagacctgcccccgagctactggctcgactcccgaatccagataaggtcatgagaaaggttaataaaaaatacgaacgtctggataaatcaaccactatcttcgactatccagccaaccaccacctagccgtgggtctcaagttgattgtggtcccgaattcttttgcaaatcttcccatacaggatgcggctagcgacctccctacaaaaaaatacgaagtctatggcaatatatttcacccgcttgaagaggcgttgattgagagtatggctaaaggtgttctcattgatgagaatgaccaaaatgctcctacttcgatctggggagatacattgagtacttggattgcgatgatggtgtcataccttgagataaataatgatattcttgatagctgccccgataagcgagccgtggaatggttcagtgggcgctatggtcgaatacacgaggaaaagttcggcccctgggacagacgtgtctcaaagcgactgggctctgggagagaaattcccgtggatatgaggggcaacctgctggctgaatgagatatacacgattagactccttatctataatacgcggtgggtaaaaataattcatttatatcgatatacttttgaaagctttcaaaaaattgaccaatgaccttattttgtcgatctactaaattactcccatgatgcatacaggctaattaaactacatggagggcggatattcaggtagcactgatattcgccgcaaaagaaacccccaagtgcagcctcaaaatcctatggctagcaatatcgctggagtgtgccgtcaggattatagcgggcgaaaacaacggagacgaagcatcatctagacaaaggaattgtgttttattagtcacttgtccgaggagaacaaaatgctagaatcgcaccaatttccaaagatagcctggcatttgataacctcttccaggtcacttcgcagtttgggctttctctgcaaaaaggttgccaacgcatcttgaagttcctgatcacggtcgaagtcgagctcaggtttcccagggatggcgtagctcaggaggttctccacatcttgttgatcaactgcctgtttagcacctcggcgttggtattgtgagagaatcttctcccggatgatccattcagcgctgaaaatcttaaccgggtatccgttgatttcctgtgtcactcgggtcgcggactgaaggtcgtactgaggtctgttgggccagctagcataatcaaatatctcgagctctataagacgtaccgcgtctccaggcagttggagtttaaatcccgggatggtatgcccgaactgattgaccgggccaaagtcagaggggaaagatttcaagagtatgccggtaaggaggtctgcggtgatggatcggtggtcgacctgaatcaccatatcgatatcctccgtggctctctgcggatcaggtgccatgaggcacacgctagcaccacccatgatagcatagtcaatctctagcgagtctagccgttgcgcaacagttgaggcgacatactctagctgtatctgcagaaggatgggcatgtcgaaagttttctctaatgttatagtggtcagatttcttgtcccttttatgtccagagtaactgctggacaaaggttgtatgagaaaagaaaccgatttaatgagatacgaacagagaggaagagcaggagagcaaacccggtggacggcaggcagaaaggctgccccgcactcgatcagtaccttagagcctcctagtctaggcaggtcatcaggtgtagctatatgcactttagacacatgtacttaaggtattcgcgtggcagggcctatgttagagacttcttgtatcgataattcttatgtaatgcgagccaaagaccatttatctcgcaatctcccctattaccagtcaatccctcgatccgtgggttaccagattaaccgtgaaacatgcatgcccagctgtatctgtcactttggatgtctttttaatgtctgattcccttcttggccctatcaattaatctggattaagctaagaccccaaagaaagatgaaggttttcttccgatccacttcgacccgctaagatcccggcgctacctggtcaattggtccattaattcttcttgcagtaaacacgactcttatcggcggttctgtatgctgtcccgcgagtggctccgtgcttgctgcatcccgtaacttggttggattgaataccgggtggacgttaatcgacggtggtagccccagcttgtaaaaagcagttctaatatttagatctcgtatgtgacgatgaacttgacctattgtatagtagcaatattagtacattaataaattgcaagcatggtacatataatacatacctcaagttatctacatcctggcccctaaagctcacatcaagggttagccggctccaaggggggttagaaagcaggatgcggcaaccacatcacttccaaagtcgggccatggcattaatctgccattaaatgccaccatctggattgtactgccaatttcgtgggttcaccctacttggagaggtggcaaggttcgagcagcatttctcgggctgctagagggattatgcgaggcgttccttttccaaatcggttctgttggtcaatggacgtgatagtctagtgagattaaaatgttagtatcacgcgaatcccttcggactgtagctcacaatatttgaggtgatggaaggtacatggggaagaatgggatgatagcgaagattctcaccccatgctcagaaattcacaggatgttgagatagcccatgccgagtgtgatttctcacttgatgtacctttgaagatatggcggtggttttctagagaagaatggagacaggaagagccctatccgccttagccaggaagtccgcgtctgtgatagccaggtctatccaatgaaggaagagtgtatatactcaaaataaccaagatagcaagagagaagaagaagcaagtgaagaagtaagcagtgtcttgcttatataaccggcaaagcttgcaagccccaaacctctcatttagctacctagtaagcaaaccatctatgaaggcaaacaaccaaggttttcttccgatccacttcggttcgcttagaggaactatgtcgatccgggcgctactccatctgtcaaggtggggacaagcggttggaggggatctgagcagagaatgagtaggatttgcctcattaacgctgtcataatcaaaagtttaagttaatccgtgaactaagacgattggattgccgtagaaggggcgcggtactaaaaaggaatcaagacatgagggtcaaggcagacacgcaggccaatcaccaactatactcggtcaacaaattaattagagttcgctctagtatcgggatgtgataaggttaaaattgaaagaaagaggcctgaagattcagcttagctcacattaaacttgaccatgtccctacaccctgactagttatacgacttatgggaagcaggttttcataagaagattagacttggaaataggttagacattgtatctagttttgaaaatatcctttttttttctgaaaagaatagctacaaacactcaagtgtcagtatcactgactttagagatatataattcccgtacgaacattgaagtaaaagagaagcggtgtatacaattattgtgctccatgatcattggacccatctccttgaatattcagctgaatgttttgttatggttcagcggagaaatggctggctggatggtttcccgcaattagagaaatggctggctgtactccgtattctctcacaattatcacgtgtttcatatcctcccacctacgtcgtcgtatattgcataatatttgtgctttttattggctataggccacagctatctatttgcacgagtaatgagcagcttgtttttttatcactagccggtttgaagcgcacgtccttccgcggaggagtgggaacccacatccttcgattcttgcccaacttcaagactgtatttatagtgatgacccggctagcccttattattgcgttgtctcagcgatccttgcggatccttgcggcaatccctggactggtggaagacctaccactggatactagcatggggatctaatttatctcctgcttcctatggactgatctgcacggggcgggaaaaatcatccgactaagcccgcgatccacctttccatgtacggatgtgtgtacatgaacgaatacaaagcgccccacaccgtgatgatccatctggtggggggtttcgaccaagcggagttggcttcgaccgatgggagctgagttttctcggccaggattcatcatcgtctattgcttggcttctcccgagaagccgttggttctgcgcatgcgaactagcccataatgtgacctatcagactgcgagaatcaatgagggaattttcagctgcatgctcgaaactagatcaacgtcatacctagacaaagaaaacatcttggctgctagcaagtttcagccacgctccgtgttttcctgttgtccgtgcttgaccgggtgggatatataaactgcgtcaatatccggtgttacatactattcaaataacttcgaaattcaaaatggctacatgcgattataccttcacacaccagcatgggattgttccttctgctcggattcctactggtcgggttgaccttccaatcaatccagccggccatatacccaattataagcgtctcaacgaccaacctgtgatcaagtcatgcgaaatccctctaggaatacacggcgtatccctcaaggttagcttaacattacccttttcgtgaatcaccgactgaattagttgaatttagctcaagatccctcattacgacatagtccctatcgatgcacctcccacatcggctgtcctctattcacacgctgatttcaaagcgaccatccagccggagaaagccggagataccaaagacttctatgagagatgctttgctgaagcagctgccattaacctgtttttcccggatgtacgatcggagaacatccgcatatgcatgactgcgtggctggctgcgaactgcgcggcagatgacacacttgaggctatgccacctgctgcggccacgcttgctttggaagagaccatatcgaagctccaaggaaagaaggcagacggtatgtaaatcaggatcagctgcggagaactctacagtaccgggctaatccatataatagtctccccgacaaacaaagtcgcatcgattctttgcttctttcaagaatattgcgtccagaaacttgacctcagcgaaagcacctcccgcgagctgagcaatgatatatgcgatatgtgcgagggcttgcttgacgagctccgatttcgacagggcattctgcctgggaacttggaaacttacctacaattccgcggtaaaacaatgggtatccatccattcttaactctgattcgcacactgcacaaaccaatcgagggcgactatctctccagactccgagatctccaacagcgggttagtttggtgctcgggctgcaaaacgaccttgttggcctggagaaagatcgtcggaatggcgagcctatgaatgcagtcttggtatccttgaaggaacaagcggggacggatgtggatcacatgaatgacatattgccgagaacgatcgatgaggtgtgcggtatccacaatcgttgtctttcagctgcggtggagatatacgaaggactccacgtttcattgaatggggatatccatgacccgattctggagactgcagtcctggcctttgcagaaacccatctgaaatggtgcgcatcgtccaaaagatatcaggcaaaggtagaataggtgatttattagactagtagttaatttctgggctcaataagatggcgttaaggtatacgattgagtttgtctccactttgtcagcctgcaggcgccacaatgtgataggtggaagcacgtgcagtgtagcgtgatagggctaagccgattttaggccgagaggctagagcgatgtggcaagccacatttcagccccatatacttcgaaaagcggcggtgaggaatgcgatgaacttgtgattggatagcggtgagtcatgcatgtaagattgtgacgagaaccggtcgtgcattgaatattcgaaggactgcagaatggtgtatggttcacgctactgcagacgtacttccaagactcagcattggttcagatagagctgtgaatgtggaactcggcccaggtctatcggcaagatacaagcatatcggcacagtctgaatacatgatcggttgggtccagatcggttgggttcagatcttagttatctaggaagcgagggcgaatcggggaagactgtcaagctctgggtgttgtatagcaaagaaattttaagtcaacttgggaattgggacactcacacgggtgttttctccttaggttcgaagcctgtttcttttgatgtatgcgtccagttcaaggcctatctcggcccaataaaacacgctccctccttggcaatcttgccactatctgtctctctcaccagcttcgttcaggtcatggcttttgcttcccttccattatcacgcccgagcatccatggagattcctatgcagattttatatttggcctagcactaacctttgtcaacattcaatatattgccgtataaaccatgatgtctacgtctttatctgtggccaattttcttctactgagagtatagtagacatatcaaaagcgaaaaaaaaaaaaacatacaacagtgaggattcgctggtggtcacccacccaactactaactcaccggcgnnnnnnnnnnnnnnnnnnnnnnnnnnnnnnnnnnnnnnnnnnnnnnnnnnnnnnnnnnnnnnnnnnnnnnnnnnnnnnnnnnnnnnnnnnnnnnnnnnnnnnnnnnnnnnnnnnnnnnnnnnnnnnnnnnnnnnnnnnnnnnnnnnnnnnnnnnnnnnnnnnnnnnnnnnnnnnnnnnnnnnnnnnnnnnnnnnnnnnnnnnnnnnnnnnnnnnnnnnnnnnnnnnnnnnnnnnnnnnnnnnnnnnnnnnnnnnnnnnnnnnnnnnnnnnnnnnnnnnnnnnnnnnnnnnnnnnnnnnnnnnnnnnnnnnnnnnnnnnnnnnnnnnnnnnnnnnnnnnnnnnnnnnnnnnnnnnnnnnnnnnnnnnnnnnnnnnnnnnnnnnnnnnnnnnnnnnnnnnnnnnnnnnnnnnnnnnnnnnnnnnnnnnnnnnnnnnnnnnnnnnnnnnnnnnnnnnnnnnnnnnnnnnnnnnnnnnnnnnnnnnnnnnnnnnnnnnnnnnnnnnnnnnnnnnnnnnnnnnnnnnnnnnnnnnnnnnnnnnnnnnnnnnnnnnnnnnnnnnnnnnnnnnnnnnnnnnnnnnnnnnnnnnnnnnnnnnnnnnnnnnnnnnnnnnnnnnnnnnnnnnnnnnnnnnnnnnnnnnnnnnnnnnnnnnnnnnnnnnnnnnnnnnnnnnnnnnnnnnnnnnnnnnnnnnnnnnnnnnnnnnnnnnnnnnnnnnnnnnnnnnnnnnnnnnnnnnnnnnnnnnnnnnnnnnnnnnnnnnnnnnnnnnnnnnnnnnnnnnnnnnnnnnnnnnnnnnnnnnnnnnnnnnnnnnnnnnnnnnnnnnnnnnnnnnnnnnnnnnnnnnnnnnnnnnnnnnnnnnnnnnnnnnnnnnnnnnnnnnnnnnnnnnnnnnnnnnnnnnnnnnnnnnnnnnnnnnnnnnnnnnnnnnnnnnnnnnnnnnnnnnnnnnnnnnnnnnnnnnnnnnnnnnnnnnnnnnnnnnnnnnnnnnnnnnnnnnnnnnnnnnnnnnnnnnnnnnnnnnnnnnnnnnnnnnnnnnnnnnnnnnnnnnnnnnnnnnnnnnnnnnnnnnnnnnnnnnnnnnnnnnnnnnnnnnnnnnnnnnnnnnnnnnnnnnnnnnnnnnnnnnnnnnnnnnnnnnnnnnnnnnnnnnnnnnnnnnnnnnnnnnnnnnnnnnnnnnnnnnnnnnnnnnnnnnnnnnnnnnnnnnnnnnnnnnnnnnnnnnnnnnnnnnnnnnnnnnnnnnnnnnnnnnnnnnnnnnnnnnnnnnnnnnnnnnnnnnnnnnnnnnnnnnnnnnnnnnnnnnnnnnnnnnnnnnnnnnnnnnnnnnnnnnnnnnnnnnnnnnnnnnnnnnnnnnnnnnnnnnnnnnnnnnnnnnnnnnnnnnnnnnnnnnnnnnnnnnnnnnnnnnnnnnnnnnnnnnnnnnnnnnnnnnnnnnnnnnnnnnnnnnnnnnnnnnnnnnnnnnnnnnnnnnnnnnnnnnnnnnnnnnnnnnnnnnnnnnnnnnnnnnnnnnnnnnnnnnnnnnnnnnnnnnnnnnnnnnnnnnnnnnnnnnnnnnnnnnnnnnnnnnnnnnnnnnnnnnnnnnnnnnnnnnnnnnnnnnnnnnnnnnnnnnnnnnnnnnnnnnnnnnnnnnnnnnnnnnnnnnnnnnnnnnnnnnnnnnnnnnnnnnnnnnnnnnnnnnnnnnnnnnnnnnnnnnnnnnnnnnnnnnnnnnnnnnnnnnnnnnnnnnnnnnnnnnnnnnnnnnnnnnnnnnnnnnnnnnnnnnnnnnnnnnnnnnnnnnnnnnnnnnnnnnnnnnnnnnnnnnnnnnnnnnnnnnnnnnnnnnnnnnnnnnnnnnnnnnnnnnnnnnnnnnnnnnnnnnnnnnnnnnnnnnnnnnnnnnnnnnnnnnnnnnnnnnnnnnnnnnnnnnnnnnnnnnnnnnnnnnnnnnnnnnnnnnnnnnnnnnnnnnnnnnnnnnnnnnnnnnnnnnnnnnnnnnnnnnnnnnnnnnnnnnnnnnnnnnnnnnnnnnnnnnnnnnnnnnnnnnnnnnnnnnnnnnnnnnnnnnnnnnnnnnnnnnnnnnnnnnnnnnnnnnnnnnnnnnnnnnnnnnnnnnnnnnnnnnnnnnnnnnnnnnnnnnnnnnnnnnnnnnnnnnnnnnnnnnnnnnnnnnnnnnnnnnnnnnnnnnnnnnnnnnnnnnnnnnnnnnnnnnnnnnnnnnnnnnnnnnnnnnnnnnnnnnnnnnnnnnnnnnnnnnnnnnnnnnnnnnnnnnnnnnnnnnnnnnnnnnnnnnnnnnnnnnnnnnnnnnnnnnnnnnnnnnnnnnnnnnnnnnnnnnnnnnnnnnnnnnnnnnnnnnnnnnnnnnnnnnnnnnnnnnnnnnnnnnnnnnnnnnnnnnnnnnnnnnnnnnnnnnnnnnnnnnnnnnnnnnnnnnnnnnnnnnnnnnnnnnnnnnnnnnnnnnnnnnnnnnnnnnnnnnnnnnnnnnnnnnnnnnnnnnnnnnnnnnnnnnnnnnnnnnnnnnnnnnnnnnnnnnnnnnnnnnnnnnnnnnnnnnnnnnnnnnnnnnnnnnnnnnnnnnnnnnnnnnnnnnnnnnnnnnnnnnnnnnnnnnnnnnnnnnnnnnnnnnnnnnnnnnnnnnnnnnnnnnnnnnnnnnnnnnnnnnnnnnnnnnnnnnnnnnnnnnnnnnnnnnnnnnnnnnnnnnnnnnnnnnnnnnnnnnnnnnnnnnnnnnnnnnnnnnnnnnnnnnnnnnnnnnnnnnnnnnnnnnnnnnnnnnnnnnnnnnnnnnnnnnnnnnnnnnnnnnnnnnnnnnnnnnnnnnnnnnnnnnnnnnnnnnnnnnnnnnnnnnnnnnnnnnnnnnnnnnnnnnnnnnnnnnnnnnnnnnnnnnnnnnnnnnnnnnnnnnnnnnnnnnnnnnnnnnnnnnnnnnnnnnnnnnnnnnnnnnnnnnnnnnnnnnnnnnnnnnnnnnnnnnnnnnnnnnnnnnnnnnnnnnnnnnnnnnnnnnnnnnnnnnnnnnnnnnnnnnnnnnnnnnnnnnnnnnnnnnnnnnnnnnnnnnnnnnnnnnnnnnnnnnnnnnnnnnnnnnnnnnnnnnnnnnnnnnnnnnnnnnnnnnnnnnnnnnnnnnnnnnnnnnnnnnnnnnnnnnnnnnnnnnnnnnnnnnnnnnnnnnnnnnnnnnnnnnnnnnnnnnnnnnnnnnnnnnnnnnnnnnnnnnnnnnnnnnnnnnnnnnnnnnnnnnnnnnnnnnnnnnnnnnnnnnnnnnnnnnnnnnnnnnnnnnnnnnnnnnnnnnnnnnnnnnnnnnnnnnnnnnnnnnnnnnnnnnnnnnnnnnnnnnnnnnnnnnnnnnnnnnnnnnnnnnnnnnnnnnnnnnnnnnnnnnnnnnnnnnnnnnnnnnnnnnnnnnnnnnnnnnnnnnnnnnnnnnnnnnnnnnnnnnnnnnnnnnnnnnnnnnnnnnnnnnnnnnnnnnnnnnnnnnnnnnnnnnnnnnnnnnnnnnnnnnnnnnnnnnnnnnnnnnnnnnnnnnnnnnnnnnnnnnnnnnnnnnnnnnnnnnnnnnnnnnnnnnnnnnnnnnnnnnnnnnnnnnnnnnnnnnnnnnnnnnnnnnnnnnnnnnnnnnnnnnnnnnnnnnnnnnnnnnnnnnnnnnnnnnnnnnnnnnnnnnnnnnnnnnnnnnnnnnnnnnnnnnnnnnnnnnnnnnnnnnnnnnnnnnnnnnnnnnnnnnnnnnnnnnnnnnnnnnnnnnnnnnnnnnnnnnnnnnnnnnnnnnnnnnnnnnnnnnnnnnnnnnnnnnnnnnnnnnnnnnnnnnnnnnnnnnnnnnnnnnnnnnnnnnnnnnnnnnnnnnnnnnnnatcgcgcgaccgggggtgataagggtgagtgcactataaacggggtgagaatcagggtgagaatcacccaggtcgcgcgaccaccgcattgaccccttcagctgaaccaacggcagaatatcattggatcgtgttgtttcccttgaaacactcgatatcttggcatctgcatataactagaactggaagtatcacacacctaggcagtaggcaagttggcaataccaatcgatttggttaatctgctcaaaaagctatctcgaaatcgagctaaacgcactcggcgggacttatatcacgggccaatcagagctcagtgtaatttagatataactaagaagagaggttgggaggaaagatccaccacagcggctgagggactagtgtttataaacatgagagaatcttcctagctaaacctctttatgcagacctgtcacatcacaagtcagtggccagccacaaaagaaacgctaggaaggccaactttgaaagcggagggccaatcaacaacgtacaagtttggacgccacgttcagctgtatcggcacatatttgacccctacactgcttggcagaatacttgcaggagtggttctcttggttttctaacagatatcgacactaaccctcatgtgggctgtgcaaattgcctaatgggggttgcgcatttatgcgcaacccccattaggcaaggcaaggcagataaattacaccgatcaaatggcccacggccctttggaaatgactcggaacatggccgtccagtaatattatcccgcccccgatcggacattggtgaaaatcatctgcggctggagtaagcgctttgggatgactcgtgtgattatgcagcagatacattatttgtcacatctataggctaccccgcttatatcatgaaagtacaccacgcatatatacacaggtgcctcattgggaactatcatttccatccatctctttggactcaacaacgactatgtctcaaagcaaccgtgcatttcaattcgaaggcagcgacagtgattacatagcctttcttgagagccggctttcagctgccttaagccaaggaactagccaggcttctgttggcgcggcgatttcgcggagcgatgctccagcgaccacatcatcggattctcggccgactacttctacgactgtattagcggactctcaacaaggcactttagctatagcatcagcggagcctcagcctagtgactatcggaatggatgttcagtgtttcgggcttctcgtccagccagtcctcgtgcgactggatgtcctccttggtccactagagatgatctcaaaattctatattatgacccgatccgaaaccgcgacaacgatcttcccgataatgctctctccaggttgccatcctttaagcaaacatcggttgttgaggcccaaggcttgaaggagctcagacatttcattgaggacgttacgaggaagtctcattggattaaaaagaagaaagagcttggattatctcgcccagaaatcaaccaagataccattcacgcgctgtgtggtcgaccgtcagcctcaaacctgcgcgatgagtcaaacttatacccaaataatgaaccctcagaacacagcgccttgattatgcgaggatgcgactatggcgcgttgacgaaggatagaaaactgcaaggaaatcttctccttcacatcgccaaataccaacagctcatatttgtgtccttatgtgtcgtcatgcttgaaattggagctccgattgatagtgtggactggatgatgcgccgatatatcagtgatactagctcagcgaatctccggcggcttcgatatggatgtaaatgggtaaatcgttgcatgtctaagttgttagaacggaactggggttttttaagttgggaagctttcctgttatgttggtattcctatccagagtagcttcttgatgctgatcacctcaaaagttccccggtctatccaacaatacggacgatttgcatacacgaaaaacagttgcgaaaccttcgtgacagatatggggacgcccgatctggcacttcccttcgctgaggatgggctcagtccgtactgccttccttgtttcattaaagtgatcgccggcaacgacttaaagtatattaatctcatgaatattggtgaacacatgcttatttatacagcctagttgatatttgcaacagtttgggctatagcatcctactcgtttctccgatatacgaaaactacttcaataatgcccccctggacttcaatcctttcatacatgcatacagcgaacctgtcgtggatttcaatccattcacatatgcacataacgacccggtggtgaattttgacgccttcaaccaagtatttcccagtggcgcagacaatccatgatccgaggagggagaggaagaaacagaagcagcatgcaagctgacaggtaggctgacgagaatgaaaccagttgtggaagttatatgcaagaaggaaaagacgaaagaggaaagagtaacgcaagagctggccgctgagtaatcgactcattattttgtccgtgtgcgatcagcttaggaacatgttagcgacgggcaagcgctgagcggctttcctacatacctgatgatagggggaaccgcaaagatagccgcgagcctgggctcaacggttacatcaccatcgattcgtctcatcagaccatgcttaaaagcacctccgggttcgcttcgcgccgaatctgatatgttgcagataggtataatattgacggggccgggtaacttgtcccatttgaaagatgtgttccacatccatactgtgaagttccaattctgggaataaattagtaggtcgccattcatagaaacttccaaccatactggaaggccaactgttctgagaagaggcttaacgaaaggcgaaacctctttgtgctcatactctagatttcccttcccatcgtcttggaatttcatgccggaaagtgccagcgcgagggaatctagcaggctctttgcttcttcgccgagagatgagtctgtcatactgagctgtgtcagtacgcgatatcggcgagtattttcaattccggcggtagatctcaactgtccaacgtggagtcaaataacgcaataatgtgggcagatggaaacgtgtacctctgttttcaagcggaagaagtttggagcgaccgaggtgtggataaaagaggaattgccgtcgcagaacacttgaagatgaccgcggggtgaggggcactctgacgggtcccgtgaccttcggtacccatcgttcgacgcgggtccacgacaacctagtgagatcacagcccgaccagtggagatactatttggatgtcaaacatccgtcttgatccttagcatgctgatagtgatttttttctctactaacacccgacatttaccaagttggtattttgcgaacattttcccttgcatacattatccggaatttggttccaaggttataaggtatgcttacttatcgtttcatgcccaatagagatcgaccgcatatatgtggtgaatctccattaggcaaaccatctttcaccaaagtccagtgggaatgtgacatcactactaactaatttacaatgtacgggccgtattctatatcattctctctgttattttgctttagtaaaacccacaactcgatctctaggagtggcctagaaaataaccatcttaaaaccaaacctatgagaatttatgactcttcccttttagtcgctgcaacgaaaaccacataagatcaaggttttagattgatatcacaatactcggtattaagaacacacccacacgaagaagaaatcgataacaggcactaaccccagggctagtgccaagagattacttgatactgacaagttaaatcaaaccgaattacagggttttgattcaaatagctatcttagtagattcttccaactaatcacttgattggcatcaacatatgttcggagaagaaccagcccggtcaaacgaagctaacctggtgtctcaagatcatattgttcctttcttcgctataaatctgaacgagcctccgtcagcgcagaaagcacacttattcatggaccagtccagcccccaaacatctgccacgccggaactcgtcaccattcccatcaaagagaggcaatccttcgattttgatccgccgacatttacgcctccattcccaaacttcaaccccgcgtggactatttgccatgttgctggcacacaaggtctgtttagcttaccaaataggattggactctagctaaccattgcagtgccggttgtgattgttacgaaattgggcgcaagatatgttgctatcccgtgtaccgaagaacttttaaatacttgctaccaactattccctaatcggggccttatgttttccatcgctcaggtttataccggcatgatgaagatatcgtcccactcgactctccatggacaggcaggaatggctatgttgcaatttcttgactgggacatacactactctattaacgacaccgacgcatactcagcaaaaatagcgaaacgacttcagacagatgtgcttgttcggatggatagagggcggatagaacatatccagagatatgatctgcctttaaggttaggcacactggtgactttgagggaggagtgcaatttctagttgattgaggtttcatggtgtgattttaccacccctggggttaggttaggagatatcacagatttactggcatgcttcaaaccataagtcggcgtttctctattgctccccgtctcgatttgtcggagctagtttatttctattatttcttccttctccagatattacaggccttttgctgtggagggttgctagggagggcaatttggcacagcaagggaagcgctcgatctgtatctataattggtgcattcatatcaaaaacggggtccgcctccaccgccaaggtgatgctgagaagtcggacttgcttgatatttaagctcgattgaggtcctattggtggcagcataagctcctctgcttctggaatgagaaacttcgcttgtattatatatatcccttgccctacatccggattgaaaaaggaacattaattgctttaccgttgcactattgttggtttatccttatattctatgcacttctgattatattctatgcacttctgcctctcatttctctacaattgaagttaggtataagagcccgcgagctatgtgtttagatctgtgctgacttgcttcgtctgcaaatagttcgagcctcacatctccattgaaagcaatcaacgcaccgttatataggccttgattattaaggttcgcgatatcattaatccaaagtgcatagatagaggctaatatagattatagtgaagcatcatgtgttttcaatacacctatacttatggatgtgaatgcgtggaaacagctccactatttccatgtgccgataaggtcaccaaaggtctctgcacaatgggagaagtgctaccaagaaaacagaatttcaagcatcaatatggcaagtatcgtatggctaagccttaaggtttgaagccagggcttattctcacttccattgatgagcacagtgaagctataaagaaattgatagtatgaatttgaataataagtcattaattagactagcaacatcgatacaacagctctctaaaattgctaagtaacgtaggaattacccaattaaataatcacttaaggcttttagaaaaggtattccctccttcatgctctttatagaccacaaccctctaatttcctagagttaattacatctttacaagaactcaccattttttcatcggattagcgcccaagtctgttttcgtgcgatttatattaaagaagccccaacagttacttatatttatcaattagacgaacctatagaaagctataaagtgtctcccttcccaggtaactatcctactaactatcccagtcacatggcattttacctcctcttctcttagctatatcaataacaccaataacacctaccaagcccctcactgcgcaattgctacaggttataaatcaattttgtatatttttctttgatccaacacatagcagatatgtaactaactattcagtccataaaatggataaccctcagttcatgattgaacacggcgatgtcgctacttatatcatctcttcggccccgtataatgataggcccattactaccgatctactatctggtattctttctcggcatataggatatgcccctccgacgttcattaagaatcttatagggtcaaatgctagtaatacagacttagaatatatggtcgtactatacagtctgctaataatggatatcctgccgcccagttccctacatacaccaatcaagcgtatactttactcacataatggggaggaccttatacattatcttatggataatttggacattagggtagagagccagctaggaaggatataatatctctgttagcccgactataggaatttggccaatgcatttcgagccgttgagatagtagaatcattaaacgcctaggggagatggttgttttctgtataaaatttgttcagctcatagttagatattgattctccgatgaatagagaaagaatgtacttttaggactattatctagtcaatgaatatgatgtgatggatcacgttatgagttgtgtggccttccatgctcggtgggagataagttcgagtcccatatctccattgaaagcaaccaacgctccattgtatgaaccttgattattgaggtttcgaattagaccccctccgttgcttactttatcaaattaggcgatcctacagaaatctataaattgtctcattcccagataattattctcacagcaagtcttcctattttcccttaaaagagagacttgccggtatgtccttatcttcatcgtccacaattagcatcatcaatgttagccaaggcctatctggcctaagggccaacgtaagccgtgttttcgtcatttgttaccaagaatataatgcaacaggcacaccactataagttgactcctagcagcacagccaatttatctaacaaaagaataaggggcaaagaaagtatcactagagtgaggcttgaagaggggtcactcactcccatgaatgattctcattctatcgcggctatatttcagaattcagaggttatccaagatatctcggacgatccacaaattagagggctgaaacttatcgtatacgagtaggtaatatattcttcttttatggcttaatgaccgacgaagtgataatcaagcccagccgagagtacatcaagtacttcttatctataagcacaagtcccccactcatatatccaaaatcagctaatgtcccagggcgttcttgatcagaatcgcagctccgcagtctgcctttataccaatctctagccatatatccctgccacaacacgtacaggatatcagcccatttgacgtatatgagcaatattaaatgctgtggatgcctcggtgccctagttaagcacccttatgatagttagttagatagttagatagagagctctctcttcccctaatacaaccttttttacttctatctttagtacctacactctgtattttattatataataattgatttccttccgtattctgatactttattatttctttcgattccttccatactaaatttcctagtacattccagtttactagttacttctaaatatttccataccatagctcacatatggttcaggcaaagattgggatagacagaagaagctcgacatagcaagccctttagggtcaaggtaaattgtctgtttagttacaagatctataaaatctgaaatattagctcggtaagaaggtctggctctttgtcaattatagcctaccattggacaagtggcggatatattttcctatatcaaaccgtactgctatagttagtgagcatataaacataaatgagcttctcttctattttgattgtattcatgcctctagataactgcaacaaaaaaggcccatggattgtttccctatactcacgctacaaagcctactgccgaagtgggttggtccttttttctttcaagacaatccctcgtcagtctggggagatcaagaaaatcgtaagttgcacaaatacgcgcaatgatagtattctcgctcactataaggtatagaggacgccgaatcagacagcatactcgagcttccaaacatcgaggttccaaaaatcatcaacttttggcaaatgccagacccttgagtaaatactgctgtctataaaggcatagagaatgcagagtcttctctagggccagacaatatccttgggagaatcgaaaaattgccaacagagcttatagattccattatcgaggctagtgttttttccgagccgcttggatcacatgatgccttacatactctacaagctttttgccaggaggagaagggctctatctttaaaactaggattcacactgttcttagaagcctttcgcttcggaagagatttgagactagttgggaactctaccctaactttgaccatacgaaggctcgtcagtgtactttcgataaaactgctctgtatgatttagccttaaaagcaattgtcgattgtccttagtgctttatgtttctactcgatcactaaataattagtccctactctttttattaggataggtaaaccctctatctgattgcggtaaatttaaagaaccctgatttgatagagtggacaatgtctgcgatagagcccctcgacctccttaaacctatcttggtagagggacatatgataatattataattcactacctaggatgcctagttgttctagagctgctggaaacgtcttcgattaatacctgaaattgaattaatacttaggccaacggagataatgaatctgtgtaaatttgccgatatagatctagtaaatcagctgctataccgaggtgtggatcttagaatccctaatccaaataacggacttctgaattggtatcagcttttataccaataaaaccctgaaccgatgttatgttggttctggagccataacgaagagatcctagaagacctcttgacttatgtggcgagacgcaactgtgtggccggagtggtgtggatctcgaaccataccgaaagccacgacgactggcgctaagctgtatctgtagctgccgataaagtggagcgggagagcgctgaaatatttgaattccttatataatacccgcctccgggatatagaagggacagcatgggccgcacgggctgtatactctctgaggatcttttgatcacgatcgtcggtagagcgtgctctaagagttgtatatatgatttgctcctcttaggcgaatgctccaatagtgatatacaacgtttgcaaagcgataaagcatggttggaagaggttgctgctcagaagatccaaacaattcaagggttgaatgagactgtcggagtggttagcattaaagttcaagcgaggaaagccggtctaaagttggtgacagaagctctagagactttcaaaggatagggtagcattggtcattgtactcaatcaagttggtgcccaaaatatgtacccgaagctcattcaatccccgggtatgcctactgttgccggccgactaggcggcnnnnnnnnnnnnnnnnnnnnnnnnnnnnnnnnnnnnnnnnnnnnnnnnnnnnnnnnnnnnnnnnnnnnnnnnnnnnnnnnnnnnnnnnnnnnnnnnnnnnnnnnnnnnnnnnnnnnnnnnnnnnnnnnnnnnnnnnnnnnnnnnnnnnnnnnnnnnnnnnnnnnnnnnnnnnnnnnnnnnnnnnnnnnnnnnnnnnnnnnnnnnnnnnnnnnnnnnnnnnnnnnnnnnnnnnnnnnnnnnnnnnnnnnnnnnnnnnnnnnnnnnnnnnnnnnnnnnnnnnnnnnnnnnnnnnnnnnnnnnnnnnnnnnnnnnnnnnnnnnnnnnnnnnnnnnnnnnnnnnnnnnnnnnnnnnnnnnnnnnnnnnnnnnnnnnnnnnnnnnnnnnnnnnnnnnnnnnnnnnnnnnnnnnnnnnnnnnnnnnnnnnnnnnnnnnnnnnnnnnnnnnnnnnnnnnnnnnnnnnnnnnnnnnnnnnnnnnnnnnnnnnnnnnnnnnnnnnnnnnnnnnnnccccgacgactggcgctaagctgtatctgtagctgccgataaagtggagcgggagagcgctgaaatatttgaattccttatataatacccgcctccgggatatagaagggacagcatgggccgcacgggctgtatactctctgaggatcttttgatcacgatcgtcggtagagcgtgctctaagagttgtatatatgatttgctcctcttaggcgaatgctccaatagtgatatacaacgtttgcaaagcgataaagcatggttggaagaggttgctgctcagaagatccaaacaattcaagggttgaataagactgtcggagtggttagcattaaagttcaagcgaggaaagccagtctaaagttggtgacagaagctctagagactttcaaaggatagggtagcattggtcattgtactcaatcaggttggtgcccaaaatatgtacccgaagctcattcaatccccgggtatgcctactgttgccggccgactaggcggttgtttgctcagatgaccttaacaaagctttcctttactagttttcaatgcagcagtctgttcttcctgtttggattttggatattaattagtccccgaggtcatactatctcacgcttaactaagcagctataggctcttcagagctagggctttctcaggtggcggccgaccccgcagattcggttatggcgtagactaggcatcttaatgggaacgattatgcatttaaaataccgttactatgtcgagtactatggtcttcgtacaagtcaggccactatagataaactacgaacctctcatatttacgctagtggagtggaaaaaccgagtgaggaaatgagtttccggacaactctcagggtcaatacttatatttgctagttttatccagattcatatcgagaaatgcaactagaatcatctcgattcgaacatgccaaatatataaagctccatatctcgttgtcttgcctttctatccctcctcctcccagtttcaattacaactattctctatcaagctagactgttcgggcctagtacagggacgcaaacatgacaacagcgcagaacagatcgcctcgttacaataagctatctggaatggagatcacaggctttatggtgttttcagcttcctctaacggagccgacataaattccgaagtgaagcggtctctacacttatggccaaagatagaaaaagcccctttggtctatggcaggggagatactgacacatatacgcggtttttacagcgtgggaccgaggaaagcgacgtagtaggtttaccaaagagtatattaaaccaaggctgacaaatagaagttcactcagaaaatcaaggaggctataggcaaagttggctttacctatcgtcaaggccccgttatcgttatctcctccgaaaaacactcatagggcactaggcttacgcacctagctcatcctgcggtatctatctttcgggatctttcgaacatcgaaaaaaccagagtgacttttatgctatacccagaggatttaacaaaagaggaaacgcgggaaagccaaccagttaagcggaagctacggccgaacgaaatccttttcgtgaaaggatcagtcagaatagagatagaggttcctgctggaggctcctttatctggcaagggaacactggcgcaccaatagggcctgatatatacaggccagaggtttttgaattcatgacagtttaggcagctcgcgtcctagggaatcggtagtattagacgcggaacctagataaagaattgtattagtcataagatataataaaggatataagttactaccaatacctgatatttagacttaaaatagagaagtcgttatacatcaataagaatattagtatggctagctcttagaagctgcatggctttagcttcttcgataagagataatcggcagaaagtaggcaagaccggggcaaacagaagtgcaattccctcactaaactcaatctcaaaccttctaagctttcacccctattaaagagcactacaagcattgtgatcgcttaaccgccctaggtgatgaaggaaagacagtatcgaccagataccgcggacctgactcttaggatgtgcacagtctaatccttgtgtccatagccattcttcctcttctaaggctagagaagaccatcgaaggatagtttgtaggcacacgatccataagcgtaaactcgcaccacatgaaataaaatccacagctgtactagtttccacaatagctagagagaggtcggcttccaaaaaccttgaaaaatgttccatctaaatggataggtcgtaaagcagaccctccgcagtgactggtggattacagcgagctaacattgtcaatacgtgaaagtgggagtcgctcagataggttaagtctcccccctgccgctgactcagaaacctggaaggtgaccaaataggtatagtatagaatacatccccgcagggatagttggttactcagaacatagacccacccagactctgtatgatagtacatgcatgcccctgaaatgggtatctttgtgataagggctccaatatataagcaatacatcttgccagagaaccgcggatccatatactacccatcaactatagcaaacatctttgcgaaccgatccatgtcaaggctcaatatcttcacgctgctaatggtatatttcggggtctcaaaggtacaggcaaactctgtttagcagattaaaacaaattaactaactacttaggccaacactaaaaattacccaacagaactaccggattcccttcccttagggaacattaagactcaaccgggcaagatctaccctccgaacatacaaggacagccaagcagcccgccagacataagacttcatcatggtggagtatctattcaaggagaagatccaatgcgcctcagcggaggtcttagcgcttcgccacatagagcagcaagtgatcccgtgccaccaaagggaaatgttaccaaagttttatctatcaagtatccgggagctttagctttaagcaaagcaaagctacgtattataattgagtcacaagggaagcaaacaaaggggtagtacaaacataagaaattcgaaaagagtaatagtataaggaaggcactagaagaatttagacctacatggcgataaggaatacagcgtcataatatacagtatactcggtgaccaatacaggttaaatagggatataatggaaagagggcatgcattctaagctatactacttctagacatatagcgcgtccttagtacccaaatttgcagctaaattgccacatttcatatcgccgcctcaatactgcttatattcactggctaaatcaaccgacataccgaatagtcttaacagatttaacaaataacaacgctggttaaggtctggggacagaataatatctttatagggtatacattctgagctatactattttaggataatatggcctttagacattttatacataattagcggtatccgtttattgcttacagtcaggattctcctctataagaagctacttaccaccttagacaaatcagggttctgccgaacaccaagggttccaatcacactggcagagaccagcacaaaagttctttcaaatggaatcactccaggtcagtatatatcctccttacctaccagaatgttactgaagcctaccatatagactatacgtatccaatctgattttgaatacaatatttgcaaccaacaatccgacacataccatgccctcgctcatttcaccttggatattccgccaggggaggatagcaaggttttcattgctattccactaggcaaaggccagtttaacctagcagtggaccaagctattgttggacgagtcaaatcccaccacaccgatctgagctatttacagttgttgagctccgatctactttttgccgccaagtttggtcgttcgtatgccgagaccgcgtttcatgcgttgagtgaaatgatatccaaatacaatatagcagcgggttcagtctatatttcaaatgaccaacgcggtatcaactggtttgaggcccaaatggagcgctttaacgaactccaaacccatttttataaacaaatcttgccatgaaacttctctgtaaaatttcgtgtgggcaagagacaaagtgcagcaaggcctagaattcgaagagcaggggaacatctggcaacaccgcatgtaactagcaccttaattaatgcaccagataatctgcccaaaaatatacctacaagcccgaaagtgctggttattctacttcgctatcatgtgctcaccccgatgaatgattagtaagaatatattttcttttcctgcctcataatattttctttactttaacataacactgcagcatttaattgcgatgtacccagattttggatcatgccgctaaacagaagcgccacatccaatgtctactaggaatagaacggtcatcaataaaaattttgcaatagaatgttgattgcccggccgatcatagcatgaaatgcaagcaacttctctatactgcatactctcatgaattaagtcacgaaccctaatctgaaacgagctaatctaattttagttcaccgctccgtaatggcggcagaactgtaacggtaatggtcatacaaaaatcgataagtcgtggttataatacagtaacgccccatagaatcgcggagcatcttttatgcggaagtccaattcccttgcgatgtcaacaaccaagacaataatgtaaactttcaacaccagggctataaatatatagtacagaatggacttatgtctctttggattgaaggcattgctacacgatcatacgttagttagtcttcgggggaaaaagaactacggaagacgcctggaagggcgagaatcactcaccatgagccaacccataccctcagcaataccagagccatccacagcagagcacgcaatagctttccactctcggttccgaaattcgtctagtttcaacgcctctgatatctcctccggcgtctttgccccctctagatcctgtttgtttgcgaacacgagaagcggagccgtgcggacgtctcgcacgccctcgaaatccagtaagtacctcagttcaaaagcagcgttgtccagccggtcgatattagtggaatcgaccacatatatgatcgcggcagtatcgctgaagtagtggccccacattggacgcaacttgtctcggcctcctaggtccttaaggcaatggcaagtgggtcagcatcaatagcacactcaggttatctagaagaggctctctggtccaaaaaaggaaagtgatatacccaaacgacgagatccacatctctattatatgtcactgactccacattaaatccaattgtggatactgtgtcaacgggcccgagattctagagacggccgatacttagtgtttaacaagcgaaatgcccgtggctttgtattacctttagttgtgagtagaggatggtggtctttcccgaattaaactaattatacaacgcgtggtggtcagtataataccaggtaggcatctccgagtgcgtaagacgccgaacgtacgagtccccacatcaagattcgatactccttctttcccaatagcgagggcagtagatgcgatagtgaggcgcccatgctagtgatgggtgggcgatcaagcggtggctcgttgctggaacgtaagggtgggaagggtacacgtttctgtgagtgtcgggaagagcacctcgttcgcattgacggacacgctactctattatataccaggctacgccgggcgctaaacccgagggggaaaggagaatccttgaaatgcacgtgacttgatgatctcgcagttctcttatctgagggatgtggctggttattgcttgctgcgcttgatatgagagttctggcttgggtcgatccgattcctgggaagatggtaattacaccgatataacaaacttggtctgcgccaaccttattccctgtcctagaataggagtcatctgatggtgggtctgaacatgtctaatggtcaaatagatgtggggcgagcatccatctactcgaactatcactaaatggatatcaccgcctatcatcgcggcagtttttagtatttataatcccgcaccttccaggcacactaaatcatttcaccccttataaagccgtacgacatatgagtgctttttggaacctccttattatgtctttctggacgtgagatctgattgcttcttcctgcctcaaaatcctttctacacccactagcgttgcacgtttcgaggaaatgaccataatagaatctctaccgtttgatatcatatcaatcacactccatactctcgatttaaattgccccgctcttaaatcactttgttacgtctctcagttttttcgattttggacgcaacccctcctttttaggaactttcaatcaagtttgactaagataaaacatcagtccggctgtaagtatttgggaatgctccaggaaattatagatgcgagatcctatggcgggacatgtctatgtttgtcttatttatgtcatgatgtcataggaaatgtagttgtcattgaaattgtgggtgttccatatatagcgacggaactagaaacctcaaatacccaactgcttacactttctctgcgcagtctccgtctactagctcacataatccatttagcattccaatggttctctattctcttagcaaagagaagtcttttacatgatctttatattgaggaatcgcctcttaagaacccccctgggcactgcaattttatccaccctcagatctactggttagactcgtattcggaagatgggtctcttgggtaataatttctccagatggatgggactgaaagctgcaaaacagcgggagaaagatgaagcgtcacgtcgcgattccgatattggcaggcagctgaagcttgaaaaggaaaaagcgaaaaagacctttaagatactcttggttggtacgcatacgggaaaattttctgctgagataaccaggagaatatactctttcctctatcgctccttagctgtgctgtaacaatatattctttatttagcaggtctaaacgcagcaagtattcaagtaacaacagaataacaaattaaatggaacaaggacagaatgagcaaggctcttagacagctctagacctttcgataaaacggtgtgatcgtcgaagcgttgacggaataaccttgtgattttcctccgacgtgatagtctcgcttgtggacccagagtgtctgccttctgggacctgtcaacaaaagctttgtatatgactttaggttcagcttaccagcgtgagacgtttgaagcgggctagcctcgatgtcgtagtaataagcttgcatatcaaaactgtctgtaatatccagagtttcatccactaggcaaggattgcttgtaggtgattgcccgacgacctgaaggcttccatggtcttcgtaggctagcgttcttctcggtaatgggatgaatggcaaagagatagcctggcttctaccatcggtataaaagccagaatgatctatgtcggcctcgttcagatccattgtattttcacccgagggcattgagtagagagctctggtgtcatcatactccagctgtcaaatttataatccaggtggcccaaaacaagaggttgaagcccttgagtgcaaggtagaacaggaagagagagatcagagcttggttcaaggaattcattctggagcctagaaaaaacaccttcgaaatatgtgcaattgtagaagcaagcctcctcaataagagcttagaaaattgaaagccaaacgcttgaggcggactcgttacagacagcctacttgttacgttggcttcggatttggcgcacggttacctatagttaagagagtccttctagaccaatgttaggcctgtgtttcccaaaatggcagggtatgggagatatgagccatgtcgctcggtgagagactttttgggggactgacagaaataagagctgttttttgtgtggaatccaggattgtgcagagctgaccatatccgaaccatatccaaggaatggaaagaagggaagtcagtcagcctttttaatacccaggcgcggccagagcattattagccgggaataatgcagtatatcgcctttcagacacccatacaaccgagaactgcgataccactgcctcgttgatactactcctgcttgcgtcgggtgatcacttgggagtattccgggcgaatttaggcgacccgcctcgtcgaagggcgccttggattcgtagtacctactgtgcaagggtgccgctttcttcaacctgtaacgttgcagccttcaagacaccttagccgaggtttgagggattaggaaggaattgacaagaaatcaatacgagcggcagcctacagttcactaatcacgcaagccgatcatgtaagccatcaatttcatggatgattgtgatgcctcagctcagcctcagagctccttggggcatttttgcggttggctagtgagcgaaagcgggcctaatgagcgacttactgatgatagtctaactactacctgaacggattcttatagggctcttccggcggagatcccaatgtcgagacggtaggcttaccgaacgaacccgtatagggtcctttaagctatttctcctagacacggcgtgagaaaccagccactcaggttgacttcttctttcatctctcgtttcgcagtgcccgaaatagtttagccggatgcctcaaagcccccctcaggtggctcccaggtgaacgcccaggagttctttttgcctttacattcatcatcttcgcataccggtgctcgtagacgaagaagaatgtagaaggtaagcctttgaggaacataacaaaaataagagcacttgcagaaaaccgggctatgtcgtcaggctgtttgtcctgaagaacgaaagggttatcgatctcttccacagacaaaatggaaaagcccatgatgttggggtgacgttgaataaacttgggaaggaagagtatgttgctgtacgctcgctgctcattcctgggggaacactagatattcaagctgctcggtcccactaagtgttatattccattgctgtctagaagttctaaacaaaccatgaatttaataagacagcccgagtggctgataccaaggcttaagcgcgccaacccggcctacacttggtgagagaggctctagaggtcttcaagattaagacgagttgatcattgtactcggcaaagtcaagaaatgtttatctggggattgtccaattcccgtggatggctgtctttgcgggagaatagacgcttgttagctcaggtaatctaggcatggtttatcccgcaaagggtaagcatttgatatgtcctgtggatggtgctcggcagataggacagctcttcgggggttcgagtttttctgcgcacgactcgcaaatcaagtgcccacatagaattgtcacccagtgatctggttgcatgtaacagatcttgtactctaaaacacgcctttctctttccctggaaagatccacttgcgccttttggtacctctccttctcctggcgaagttcaccttgacgtattcaattttcctttttcaaccgttttactttatggcggacttccttgttgagcagctggaaagcgttgtcctaatctattgttagataaggacgaagaagaggttgcgaggaacaagtactaaagcagacggcttcttcttttcggttcttttccgtttccgcgatcgagtctcatcttcggctgcatcgataaacatgccctcggaatcttcgtagctgttattacaacgaggggctctctgaggttgtgggctacctggctggaggtttggcagtttctcgtcattggctataataatagtgttggaatggcttgccattgtggcccggtgtttacatcggaggaatgttaatccagacgggtataggaagagaaaaagaaaatattatagtaagtaacgggctaggggaaggactttatagttgagactaacagtatctgacatagccccggcacttaataggacactgatgagtagcattatatgattggatgtcaagcccgcttatgtcgagcaattaaactctccggttaggatagatgtctctccattgatattgggttctctttctcatcagttgtaaataaaatgcagaaattgctggtcaaagattataaggaagcccacagtggttaaagcataaccataatagataaaagagtgctgtgggaagatgcaattgttcggaaaataaggtaaatctgataatttctaagttaaactaaattataaataagactgaaagcaatgtgtgaggccagctcattagaaacagtaggtaagcaaaaatttggtttgacaccggctcataataagactaaaggaacgtataaaatcacaagtccttattgtgctgtgtgcccacggttacctcggcgtcgtctccgctgcgattcttgtgtctcttaagggggcatcgggctacgtatctttagtagccgaatctgacgcttaagctcttttatctctgtcgccgagtcctttcttatcttatgagttgattttcgtctctgtgtagacgaggctagaccacgagctggcttactgtggtatcttctgttatggctgtggcttgactgaatagaggcgtcgctcctatcgtcgttacttttactagccttaaagtgattcctcgtctttgatctacgttggtttgtgtcgcgtgcaggctcgctaacttcactatcataatcttctttattaatatcgtctaatctatgctttctacgataagtattctcgagttctttagctttctggtatatcactctatcgccatctaaggtagagccggctgtgatatgacggatgaaggatctcccttctaaagtaaaaagtctgtctttctatttgacaagtatccgagtttggggatatactatgcctttagcgggtaggagtagattgagaggattaagtccctacttatcatcgtcttcgaccttctaactgatgccaataaagtcctccacgtcgtttcgcttgtatttccaaaactccctaggaagcctgttcctagtcccggttactttagcggtaccgcgagtcttcgtggttaaaatacgttctacccgacttgggttgtagctcttatataacccggcctgaatgtgatagatcggcgtggaccggcttctgtagtgcacgaatatctgagagctagtacctttgggccactaatataatactttagccgagtgtaattggcgttgctatttcattgttcttgcttctagggtatcaagccctgtgagttgaccactattaatattaatatctgattcggtactagactctttactagctgagagctggcgagtctggtctagctgattgtttccactatcggaagtggagtcggtatcttcattaatactaggattttgtgtcccgattaattgttcggcccactcttaactgatattccaggacttaggaagataatgtcgtttgttgaaggtctttagaagactacgtgttgtattataagccgcctagaattcatctggagagtgtgtctctattaccttgtttgctgcttgctgctaggtattgtatagagtattgtagctagtctcgggtatggtactagtgtcaatgtcgttgacgtcgtggtcttcgttggcccctcgaatgtgttagttaagtctttgaaagaattgaagatatgctttgtaattagggctataggatgtgaagaaatccttaactattttttccgactctttggatgtctcgctatgaatgacatttttgacccagcgacttagtgggtctagcttatgctcaattggagcatcttgatcagaagcatccccgagttcgctatccgtttcgtcatttgattcgtggttacctgcatttggggtaaagttatctgggagtgttgggcttctaacaaatcttgccttctgttcgggagctttgcccttcttattttgactatgctcttgtcttaattcttatgcgctcgaggatttaggttgatgggattcggagtctgagctcacttccgtgggtgcgggtgtttggatatcatgggcattttgctgggccttttgggccttctttctcgactttttgaccatattgtttcttggagcctagttaacttccctgtattcggatagagaaggcataatttatattccaagctcgcggtagtggttatgcggattgcaaaatcgatgctgtaggccaaaaaccatgctataggccagaaaccatgccgcaggccagaaaccatgccgcaggccagaaaccatgctgcaggccagaaaccatgctgtaggccagaaaccatgctgcaggccagaaaccatgctgtaggccagaaaccatgctgcaggttaaggacgatactgtaacgtaggagcaagcccgcaattagttcaatttctagttgagcctagttgagttacagtcaaaaatcaattgtggtaatatcagcggtatgtggatgggtgactgacaaggtaagaggagataatatttctaggtaggattacagatatttagacgagctctgtacatagacaaatacaaggctggcggaagtatatccctattcggactagtgttatttaggtggggcccggggagtaaagagagaaaaaagactggaaataataatgatttggaatattacaggcatattcgaaatcagttttaactcctcaatctcttcccttaacccatggccccacctcttaagagcactagtccgtatcgagacacatttccgccaacccctgcatttatccttatccttgattagccagcataaattacagtatctgtttcttggcattattcagacgtaagcaactacaacgtcgtcgttgggtttctcctgcatcgctctttaagtctcagttctctgaaacattctcgggtaagtatattgagtatattcagttgaacggtaatgtaaggcatcgccatataatttcccactttgtaaatgcatactgtagctatatacggagaaacagtcgtatatgcccgtacatggtggcagggcctgaagaggctttgattgggctctgattggtaatacgaaagtcgcgatcaggttgaagcggttcgcatttatttgaatctgttataaggtacagagctcctaacgttatgagtaccacgtgactgtgattgtacatagggtgtggcacgcctatgacgctagatattgaccatagctacaaaaaccagactcagcgtcgctcatacagcatatatgtatggtcatggcttgcgataaaagtcccaaacttgtagttctcattgacgccgataatgcgcaattctccatcgccacagacttgcttgcagaagtcgcaaaacatagcacagctcatataaagcgggcctacggggactagaccaatactaggttgaaaggatggagcgatgtgctactcaggaattcaatccagccgatccagtagtttgtgtacacccacggcaaaaatgcaaccgattcagctatgatcgtagatgcgatggatctcttacactcgggcaacttcgatgggttctgcctcgtctctagtgacagcgacttcactcggttagccactcggatccgggagtctgggttaaaggtatatgggtttggggagcgcaagacgcctaagcccttcgtcgctgcgtgcgatgaattcatatatactgaagacctcaggtttctcccagaatttgccccgaattccaatgaggtcgaagtgcctgaagcccgttctccagttcaagatgcccgacataatgataccccagatagtcagctgaagagttcggcagagacgagtctcgataatagtggatgggctcggctatctgaggtcggcgagcacctcataaatcgacacccagacttcaacccctccacacatgggtattctaagcttagtggcctaattattgcttcccctcacttcgacgttgaggagcggcctcctaaaccaggcgaaacgccagatttattggtccgaagacgaaaggcctctggtggaaattcgcaagtctgatttattattctggcttcatcaaataacgccaacgtacggagataaaattacggtattgaggtcaactgatcgaaatgtgggccgtctggcgggaagatgtcttgatgcggactagtgtgcttgaagtggggcgacggggataaaggaggagagattggagttaaaagtgattttgaatatcactgtactgtggcaattctcacttaagttcagacgtagtgtcttgtaagaatgccatcatttgccctaatacattcgagcactggaaatatttagtctgataccacttagcaacagccatccagttcaatatgtcctgttggtgaagttgaatggtcatttgcgcttcctggatggttgaatttcggcctttgatttcggcttccgcttgtcttacagcctcttcgaagcgagatgctttggcttcggccgccctaagtttctccacgagactgaggttttcagattgtatacgagcaatattttcaagatccgtttgcttttcgcgctataagaacccttataagttcaatgaattatcctaaagggttattgggtttacctttgcaggaactgcacgaaacgtttgacctacttcgcggtgaagctgtatgtaggcccctaccgagtgtttactcaaatgcttctgaaaaagaggcttaagcgatggatcatctatctgccatgtatagagacattcgtcctctgtctttaatcggacctcggaagggtctactttaatttcgagcctctcaactggtcagagatattagtatgtttaatttaaaaaatctgtggagcttacatatatgctgagcgagtcgcgtcctgcaagttgatcgctaaatagcccgctttttattacctagaagttgaatttgttcatccatcacggtcgaaatcaggtatcaatgatagcacggcttagctatacgacgtgattgcagtcagcaggactgaaaagattggctagttgagagccccttccccacctaaagcgcagatccgtgcatttcataataccctcacaccccccaggtctctggcaagaaatgatttcaacctgctcgtaagaatcacctccattccgagccctcggaggggaccggagaactttcaccagtactaaaggacctctgaacgtcagcctaccaaacggccaaaagcatgttaaagtcattggtgcctaaggcatgaatccactcgagccaagggggtgagtaagctggtttacttgagggagataagagaataagtgccaatttacagtgtgtgtgtatgtgtgtgtaattcatttacgctgacccctcgtcgaaacgatatgcagcctaccgctactatatatatcttcctatgtacatgtatcgtgtaccacttcctaagcgaacttggagcctcgccgaggcctgccgtggcctctatgccgtcgttgtgtttatgctgcccttatggcgcgcggctttgaaaccgttgcgatgcttcagcaaaatccaagacagcctccactatcttggttcgtgatgcactgtcaatcttacctcttccttcttctcctggacactgtacagtaagagtcgaaatcagattcccctttaggcacacaccccttgtttctcggctcgtatccgaaaccacgctattccgtatatagacaaccctggtaataattattttctaagcatagattcttttaatactaggacgacagcattacgtatattattgtaaggtacccgaaactctgatacacacctcctcaatgcccctcctccatactcttgttcccttcctttgcagcaccactatcttgcaaattgctacatcctctgcccaatatggcaccgagactacccccatcaaagctacagtttattcatgatatgatgcaaagccagtcactaaccacatctcaaatggctgatgcagctgaatgcagcgaacgatgaatatccgcaagaacttgcggctattcgggaatgtcaacgcccccccaaatcgtgtcggtcggagacgaactataaccccactgatgatagaagctctccgcgaccatctactcgaaaaacccggtctctatcttgacgaaatggttatattcttttgggacgaatttcggatgctagcgacaacctcaagtatcaggagggctctcacttttatggggtggtctaaaaagaccacgcgacagagggccaaggagcaaaatgcggaattacgggagttgtatcttcataatctctcagaatttgagtcataccacctagtctacgttgatgagtctggttgtgacaaacggattggatttaggcgaacaggctggtcaccactcggtgttgccccggttcaagtatcacagttccaccgtgatgagcggtatcaaatattgcctgcgtatgcccaagatggtattgttttttctcgcatttttcgcggttcaacggatgccactgtgttcgaggatttcatcgatcagcttcttcggcactgcggacgatggcctgagccaaaatctgtcttggttatggataatgcatcattccaccactctggacgtattgcgcagatgtgtgccgatgctggagttaaattggtttatctccccccatattcgccggacctcaacccaattgaagagtttttcgctgagctgaagggcttcataagacgcaattggggctactatgaaaatgacccgaaccaagtatttgattgcttccttgattggtgtattactacggtcggggcaagggaagaaagtgccaagggccactttcggcacgcaggcttgactattgaggatttggatacctgacaattcgtttctggtggcgtcatttcattgagcgatcgcttcgcattgagtgcgaaaggctgccacatcttcgccccatatcgcgatgtatgaactagcgtaaggagagcattcatggggaaatttcctgacccgagactcatgaaacagactgaatggggcttggcgctaaaccaatccgctcgatagggtgagggtgccccaccctattggagccggcgcttaaccagtagaatgagagatagatgacaaggcgcagcaaagcatttaaatcgcaatcatttcccccaaccgcgaacgataatttacctcatataattctgcaagctctcatgaagacatcgaagggccaggctctcggttacactaagcaatttcaatttcacgtttgtcaactccatggctgaagtagttggagtagtatctagcgccatcacattcgcgacccttgcaatccaggtcgggaagtccgttcagacactgaaagactactgggatgcaatacgcgacgcacctgatgatctcaagtggctagtacgagagatcgaagtgttcggctccataatggctgatgtcgacgcggacctaacacgataccctcctgcattagccatgataaattgtcaacatgctttgcaaagcttgcaattctgcaaagaggccgtggatgccttgaacgcgctttgtgaggatctagtacaagatgtcgactcaaaaaataggttgcgcaggtcctatcaagctgtcaagatagtgctacgccaacggaaagttgagaagcacatttcaaaactacataatgtagtccgcctacttatgctatcacagcaatgctatacaaggtacctatccactcaagatatgacccatggatcggggctaatatatgcagagcactcattcaagtccaaccagatttaattgcggagagaataagagagcgtgatgttatttcctcaatgacagaaactataaaggctcattccgaatcgcacagtttgtcttctttattacttgcttatatttgattgagctaatatgtttggcagattgttgtttagacacaacgggaatgccagccggaacgtcgaaaagaatgacaaagagcgatgctcgaaaaagcagttctgtttggcgtctgagtttaccatactggatatcatctcaggttttggagatatgtggcatacaagcttctggcggatgggactttacgttccgaacttacactgaaattccttggaatgctggggttgacagattagtcagggaagggaagatagaaatgcttcggaatctttttgcctcagggcaactttcagctcttcaccgaaatggaaaccacactctgctccatgtaagtttccaatcactgaaaaattccgtcccccatatgcttaacgagcaataggatgcggtctgccgagacaggaatgaaaaggttgtggaatttcttcttaatgaaggggcagatccatttatcgaagattatccacgccggttgactccccttcgtcttgctctatggattggaaagctcgcaccatcgaatgaggactatccgcttttaccatatctacgtgttttactcaaaaattcaaaagacctcgtctatgggagtccccaagatgtggtcaacggggtactatccgagttttacggatcggatgaggaattcagatttttgcaacaacactgctgtccctggttctacaaaatgccgcaggcgacccgtgtggaggtggctgctcgaatttcattcgacgcttcaggtgcttgccatattcctactttgatccgtgctattcttggtacagaccctttggaagccaacgaacttcaaacgaaatgttatttgtctatgacttcgagagaaacgacgctcgctcattgtgtcgcaaaacaactaggcagagatctaactgccttgagtatgtgtcatcgaagacagcatcttgtccttccatatgagtaccagacattcgtgagatacttgtcagatgatcaccaaacaacccgacaaacctttcgcgactcatggagcaacctattcttcgatatcttgcgcgctggtatagatatccacctagttgttaaccacaaaactctatttctcgcatttatagagggaattcttgcgtggcaagtatctttttccaagtctattcaatgtccgcgcgttgatacgggagtcttgaattcagttgttagagcctggctaaaggatcttaaagctgctggggtgaaattggatcaatttggtacaaacgagtggtgcacttggagcaggggggatgttcaaagggattttgttggcgatgtattgcgtgtgactggaatgagctatggcacatcccctgatgactggtacatatggctgtcggaggcatctgatactttcgcggcggagttctggaccctgattgcccagccaattgtgacaacaccaggtgaatggccagaggaatagctttcaattcatcccataggaagacggccatctcatctaagtagagggcaggtttttcggctaagtgttcgcacagtgcttctagcaccgatggcgttatggttcgtcgccgtgtcatcgactctggctcttttattgcgagactttcactcgaagtgctctttgcagcttctcttccagcaccagccgccagtacgcacttggggtcaatactaggtcttcttcagtgtccttcacgacagccttattgttgagggtgacccgccattctataaagtagtggatacagcttggcggatcctcatcatagatcttgtctttctcccactcagattcctgaagcattggtaaagtattcggtcgagatcggcttgctggagtggtctcatcgtcgagaagcacggaaggggactacaaccagatcgcgtagcataagggcttcggaagtgtcccggcatatagtgaatcctgctcccattgttggaagtcttggggctgagagatgcagtcaacgtgatacgggctgtcactcatgtttaaacccaatcgaagctctggagatctgtgtcagcttacgtgaggaccagctatcagcagacgccatgaacgaatagaaacggcagtagcacgtagggccgatagggtaacagaaaaagaaccatacttagcctaccagggttagttctctacagcagtggcaatgccttcgtcatgggaggagatagatatgcacgaagaccatggagcgaaaggaaaaaaagctggaagtggatcaggccacatcgccggatctacccccgcccccgccttcccttcgagaacgttctgtggaaatttacggtattatacaatggctcatctgacgttgaaatcaaatacgttaagagatgccatacggctaaacaggggttgtttactgagtaacctattatggactagcgtggtttcgggtacgggccgagaaataatgcgtgtgttaccagaggggaatctgttttcgactcttactgtacggtaccagtatagctcgtacagtataaagagtttcgggaagtactgtagcttgtctctcggtactttcatcaggatttcgagcgcgtctagtgagttactgtgaccaatggcgggacgggccgcgatgcgaacccctgaaccgcccgactgtgacgaacgcgaagattcgccaccgcgactggcgagaccgaaacgcaccactcgaccaccgaacaactacgctcgtgagcaggaaattgacactgatcgacgaaagacgcgttcccagcaaaaggagagaattgagctaggagaccggcgtgacgaggtaacttcggacgacgccgcgaccgagcgcgaagagctcgacgtcggcggtttggtgagagagatcgccaaactcaggcgagagatcagactccgtgacgaaatacacaaggaagaaattcagagaaccagagaacagttcggtaccgccctcgcggaggtccgacacgagctacagtccctgacgaatagaaacacgacaccgcaatgccactctgagacgtgctctcagaacaaccacgatgcgatcctgcgcgaaatccagtccttacgcgaggaaatcagtgttcccgctgttgcaggctctccttcctacgcagatgtcgcgcgcactccgccgtccagttacccaagcaacatacggtcccttttaacgctgaacacgacacccaccacctttacggacacgctattttgcacgatagatacctcgaagatggcagaaaaagggacaaaatcgacctccgcaggctcggtcagagcagcggttgaggcagagatacagttaacagagggccacgcgcactggcgctgtcgcgctgttaccgttgacccgaaaaacgccaaccggatcaggatcgcctgccgggatgaggatgaacagcagctggtcaaaaaggttgcagaacagaaaatcggggcgggagctcgggtcctccgtgacgagctctacccgatcaaagtcgatagcgtcaacaagacctccgtgctagacgagagcggtgaggtccgaaccgaggctgcagcagcgtttagtgaggagaatgagaccaacgtagccaagatttcatggctgagcagaaaagagagcgagaaggcctacggttcaatggtggtttacctgaccaaacgcatcgacgcgcgaaggctcttggccgacggatttttccacgcggggggagaatctggtgtgactagtgtcttcgaacaccgaccgcgaccgacacaatgttacaactgccaagagataggccataaggcattccagtgcaagaacgcccagaaatgcgcgaaatgcgctacagagggccatcgccacagcgactgtatccaaccggttccaaagtgtgtaccgtgcggagggcctcacgaatcgtacagcaagaactgccggaagctctatccatcacgtcatgaataattctcttcgaataattcagctgaacgtgaggaagcagggtgcagtgcacgagagtttaatgaatgacgaagacactcaaaacgcggtggcgctagcgatccaggaaccccaagcgaggaggattcaaggccggctcttgaccactccaatggggcatcacaagtggacaaagatggtgccctctacctggagggaggggagatgggcgattcggagcatgctctgggtcaacaaagaagtcgaagcggagcaagtccctgtggagtctccagacatcacagcagcgatggtcaggctccccgagcgactgatctttatggcatcggtttacgttgaaggaggcaatatctcagccttggacgatgcgtgcaatcatttacacgatgcgatcacaaaagtacgacgagagacaggcgccgtggtggagattctgatggtaggggacttcaaccgacacgatcaactctggggtggagacgaggtgtcgctgggaagacaaggggaagcggatccgatcattgaccttatgaatgagtttgcgctcagtagcttgcttaaacgcggcaccaagacatggcacggcggcggacaaagtggagactgcgagtctaccatcgatctcgtcctagcttcagaaaatctgacggactccatgacaaaatgtgctttactcgagacagaccacggctctgatcactgcgccattgagtccgtgttcgacgcccagtggtcgggcccaaagcaccaagagcgacttttactgaagaatgcaccatggaaggagattaacgccaggattcagaacgctctagccatccttccgtcggagggcacggtacagcagaaaacggatcgactcatgttggcagtgtccgaagcggtacacgctttaaccccgagggcgaaaccatcaccacatgcgaagcgatggtggacagctgacctcactcaactccgtcatatatatacgcactggagaaaccgtgctcgctccgagcgacgggcggggcgaaaagtcccccggctcgaaacgatggcccaggatgcggccaaacaataccacgatgccattcgcaaacaaaagaagaagcactggaacgagtttctcgcagacaacgacaacatctggaaagccgccaagtacctcaagtcgggagacaatgccgcgttcgggaagattccgcagctcctcagagccgatggaaccactacgaacgatcacaaggagcaagcggaggaattgatatccaagtttttcccgcctttgccagagaacatcgacgaggaaggagtgagaccacaaagagcgcctgtggacatgccagccgtcactatggaggagatagagcggcaactgtcagcggccaagtcgtggaaggcacctggtgaagacggcctaccggcgatcgtttggaagatgacgtggccctcagtcaagcacagggtcctcgacctctttcaagcctcgctgcaagagggcacactgccaagacagtggagacaggccaagatcataccgctcaagaagccgaataaagatgactacaccattgcaaaggcatggagacctatctcactccttgcgacactcggaaagatactcgaatcggtgatcgcagagaggatctcgcacgcggtggagacgcatggactgccgccgggggagccactttggggctcgaaagcagcggtccgcagagcaagcactggtgttcctgcaggagcagatctatgcggcgtggcgcggccgacgagtgctgagcttgattagcttcgatgtcaagggagcctacaacggagtatgcaaagaacgactgatccagaggatgaaagcccgaggcataccggaggtcttgcttcgttgggttggggccttctgctcggaacgaacggcaaatatcctgatcaacgggcagttatctgagactcaaagcttgccacaagctgggctgccgcagggctcgcccctgtctccgattctatttctgtttttcaatgcagacctcgtgcaaagacagatcgacagccagggaggagcagtcgctttcgtggatgattttaccgcgtgggtgaccggtccgactgcgcagagtaaccgggaaggaattgaagccatcatcaacgaggcactcaactgggaaaagagaagcggagcgacatttgaggctgacaagacggctatcatacactttgctcccaagatgcgtaaattggaccatgagccattcaccatcaaggggcagacggtggtacccaaagaccacgttaagatcctgggtgtcttgatggacacgagacttaagtacaaggagcatatcgcgagagcagcgtccaagggtctcgaagcagcgatggagcttcggcgactccgaggcctctccccagcaaccgcgcgacagctattcgcatcgacagtagcaccagtagtggactacgcctccaatgtctggatgcacgcgtgcaaggataaagccatggggccgatcaaccgagtccaaagagtaggcgcgcaagccattgtggggacatttctcacagtcgcgactagtgtcgcagaggcggaggctcacatggctactgcacaacgtcgattttggaaacgagccgtgaaaatgtggacagacatccacaccttgccggaaaccaatcctcttcgccggtgtacagatcagatcagaaagttcagaagataccaccgctcaccactgtatcacgtagccgatacgctcaagcacatcgacatggagacattagaaacgatcaaccccttcacgctatccccgtgggcggaacgcgtacaaaccgacattgatgagcagcatgagtccctggccgaagcgggcgggtgcatgcaggtcgcggttagcagctctgcacgaaacgagctggtgggttttggagtggccatcgagaagcgaccacctcggaatcggaagcttaaacacaaagcgctatccatcaccttggctgtaagggcagagcagaatccattctctgcggaactggcagccatggcacatgtattgagcacggcgacgggactgaaagactacacgatcgcactgctcacaagcaacaaagcggcggttctcacactcaggaaccctcgacaacaatctggccaggagttcgtgtgtcggatatacaagttgattaaaaggttgcagagaaacggaaaccatgttcaagtccgctgggtttctgccagtgaagacaacaagctgctaggtctggctaaagaacaggctagagccgcgacacaagaagatgccctcttgcaagaacgcgccccgaggataaaatcaaccacgctgaatctcgcacggtctcaagcagtccccagaaataccctgccagcggacgtcggaaagcacgccaaacgagtagatgcagcactcccaggaaaacacacgcgacagctgtatgatcccttgtcatggaaggaagcgaccgtgctagcccaactccggacgggcatggcgagactgaatggatacctctatcgaatcaacgcggccgacacggatcagtgtgcgtgcggacaagctaaggaaactgtggagcacttcctctttcgatgtcggaagtggaccacacaccggacggatatgctacaatgtaccgacactcaccgaggaaatctgcccttttacctgggagggaagtcgccttccgacgatcaaaagtggacgccaaacttagaggcagtacgggcctcaatacgattcgccatagccacaggccgcctcgaggccacttaaccccgccgacgaacataaatcacccctctttcattctaatctaacccaccaaccacctcgtgctattcacggtggacgcgcttcaactgccgaagataggatgttgaacacttggagaagcgccttcaagccagtctactaaccaacttactaacccacgagcatccgctgcgacactgcatgctgagaatgacaaatacgccaaggtcttgtgtatgggctccaatgagtcacagaattgtatatactatgacatgtatagtagtttagcgatagttgccctttcggctcagccgccgggcgttaatgaattgtgtgtgtgtgtgtgtgtacggtaccaatacatgaagtgatattccggatctacagtgacgatgcataacttgagcaccctttggttaccaccttccaagagaaacacaccgcctaaccaaatagccttaaacaatcatgccgatcaactttttaaatattggtgaggctagagcgggcagtattagggtgttcaaacttatgcaccgtcactgtatatcagtggtatatcttggcattagagtccgagaaccgattgaagagtgtaggtagtgacaccagtttcgggaggcaatataactgttctacattaacttctcaggaattattcgtgaacatttcatggatagatacaatacagatgaagatctaatagggaaaacactgtatgtgtagatggacgcgaagagaaaaagagagagggagcgtgcaggcaaactatccgggttgtgatgcctcagacacccaggcatccaacattcttctggagagtgtgtaaaagattcattgaaattgtgcgatcatatacgatctcctgtaagtaaaagacattcttatagactaatattcctagagcatataaaggactcagacaaagttttcagcttagactcgccatctgtattctatgtttcatgatacaattgatttctgtctttgaaatatgtatgtagcactctcctatcttgggctttcaggaactttcttaagtcaaagcctataagctaacactttgctaatttaagccgccgtaaggaaggtaaagggacagaggacacaaaccctagaaacccagggctttctatcagcgtcaagctctcaacttttgctaaagcagcctttgcaatttctaggatattatcatctttagtggctagtttggaatgtatcctatcaatctctatatatttcaaggtcaatcctgtggactgagtaatagccatacccctgagtaccgccttaaggtgaacgaaaagtgagtccctaagaaatatacgattggagaaccaaagaagctgatcttcctttgctccatggaaggagagcttgatagtatttaggttggagagatgccgaagtgattctgtaaaagtatggatatccgtccgctcttttaagagtaaactctgagctcttgtaagttctttaaaatatcgaaatattgccttgtaggaaaattgctttcctcggagctcctaccggaaatcttcctgatctcttgtatactcctatagtgtataaatgcaagtagaaaaatagtcctaatatgggatcactgaaaggattagtaaggagctagatgaagagctgaaaaatcacatatatggatcgaccaattctgatgtatcataatgaagtattctcacgcattgtgctaatgaagaaattgcgagctcttttagtttctttatccctttttctgtgaactcgactttgaatgtatggaagatatctgaggtgctgaccgacctgcaacttttattcacgagcgaaaaagatcttaaggagtggtggtcaagctcgatgacaatcaattttagtagctcgaaaggtagatccgtgaaaattgtcatgttactttgaagctaggagagccttgatataacttatcgaagggtgtaaagaaagattgtacctgccctagggtgaaataagtattaattctcgtgtagctgggactctgtggtaaaataatgtaggaaagagttgcgacactgtttctagtacaccggtctggctgctagagatttgccgctgatctttacaattgctctcccacccgggccgcgacactgtctcagagccgcggcaaaatttctatagagcttgacctggtttggttcatgcctacagtcgagcccgtcgatggatactggctattgaggacagaggtctgagctctgtagtcgatgcctgtaggtaatggataagagagcccaagaatcatgaggccaagaatcatgaggcgcctcggccgacctgagaattaaagcaacgagcttgtagtcggagaaatcatgaacggacctcaagtgcgtacctctactcggttgtcgtgactgtattttggaccgtgggcgaattactaggcaatggacggaggcctcagatgtagcgcgttatgggtctatccatacgtttttggacaagaaacgaaatcggatttaacctaaatagttgtaatatccaatgtgagcggaattttacctgccgttggtgactgggaccgttagtgtaataaggttctaattgagtggccgggattacccctttaggatcgccaggggtgtaaaactttaataaagctcggttcgggcggtttgatctgtcttagtgatatgcatgcatacggcttatgtcactatgattgagtctctttgaggatagggaaaagcccaggaagaaaaggaggtgaaagaaagatttatctcttatatttgatctactatctaacgtgctggggactggttggaggtaggacgttattgtaatgaaaggttcggaatgggccggtagcttctggtcctctatttaggtagtgatcttcgtttaggtagtgatcgctataaggctgcctgatctgtcctagtttttactttcggggaacacggaatgttgaacgccataactttgtctaccatgaactgactcgagatgtggtccctttgtatctagagatatatagagctatagatacagcacttgttttgggttgagacctttacttaggctagttactagtgatggaaaagaatattcttatataaacttggaggaaatgaaattgaggaacctggcgcagcatgtaaaatcctttgtctaatacctcagcccttggtggaaggtgtatctgtgatgattttgacattcgattcttctgatgaataaatagaggacctaaatagcctaccttgacctgcgttccctttagggggttgttgagataactggtctagagtagcctgaaggtcttgtacagcctgttcatgtgcgtggaggagagactgaagacaattgatcaactctcgctgacgttggttctctagtagaaaatgctctattgtttccttattatcgatatatccggactcctgcttgtattgactcaatcgctgtagctatgaattaacagctgggtacaacttattaagatgggactcgagcccttgtactttgtctctttctaaatgaaggctttgggataacacttgataggtttctgtggtatgacgtagtgaagcctcaagctgcgatttttgatgctgtatcctagaaagcgaccttttgtaatagatatgtaatttttgatatgccacggaattgctgttgatcctgagctccaagagcccctggtaatgctttgactactggtcttggtgtaacagcttctctaccaagacaaagacgtcattgttatattttgcggtgtttgtattgtcctagatttttgaaacagaatcagcaaatgttatatctactgtggataaaaagtcggctttactcgaagaatggcagtagtagatggcggagctaccactggattttgatattgggctttagaagatatgtcttgaagaattggcttggcctttatcatataataaagacctgagggctcgtttcctttattagtggctaaacaatgtagggtgtgacgatacacagctaaccatggtatttacagcattcagtgtcgcaggaattggtcggtgtcgcaagttgttttcagtgtcgtaagttgtttttagtgtcgcaagttgtcttcagtgttgtaagtcttttgtcgttttcagtgtcgtatcttgtttttactgtcgcacggagagactcgcaggtcttggcaagcgcggtgcgccatgggttggtgcgaggtggatatacggatgtgcacggcaacgaacgatattgcgtgccttatgacgcctgtaaatgaggcccaaaattccggctagttacactgtgtcggcctgattgataagtcaactgtaaatcatctcttcttttctaatattaagaaagtgatagtttggttgctatccttgtatctatcgataaaggcgttgctattgtgtatttatggagttattttcatttgtcgattctaactataacacttgtatattattggatgaaatcacgtggtgaaattaatctaaatctatatagctatagagtggggaacctaggtgggtattgaaatcgatgcactggcatatacgttgaggtatattttgtgtcgtaggtggtgtcatattgccctgttaattattacctctgcttgcgttaagaggtgatagagggcattgtcaatatcgtccttttaggaatggcattgcctcccgctgtaagcctcctttgatctctttaatatttctgtaccaacctaaagggcgaaactccttatctatggccctggttgtatttttatcaaatacaatgagtcgatatactggttaatgtctcgatcccatatctgaggagattactcccgcggaccattaaattctatgtcttggaggcatattgtccaacctcgagagactacagtcccggttgtaatgtgcaaagcgacaatcgctagatttcaagacccagttggaagaaactgcttataagatgggctatctcagagcagagcttcagtggcataaagagactaaatagatactcttgcagttctaagaatgggtatttgatatctttagctccctagaagacgctcttatataggcaaccgcgcgcctgcacgagtcggagtagtaatacctaatgctttggggatctaattctagaagtggagctgggggctgtttttgacttgtcaaatgtttcaggttatgggttggacttgaaggaatttgagctgtgggatctactgagtgctgtcttattgttatagtgttgggcttctttttatctcttctagagaatatcgacgtatattatagaaattgcaatgtgctaggtaatgctatatttcttgctgatggtagcgatttgccaagtcaccaaattccttcattaccatctattctcgccttatgaccttgagtagatacttattgacagttttgaacttgtcctctaagctttccgttccctgagataaattatctatcctgtcctttatactgtcgatgctctgctttatactgtccaagcggttccctatactgtccagacggcgttctatattgtcgaagcggctatttaggccttcgatattgttactcagcgtttgcgagagtgcgctaaattggcttatcgtactcgtaaatcgcttgagggtgatagatagggcttcatccgtatgcgagatagtttcaatctctcttgggccttgcggacgacttgaggataataatgcatcgacttggctgccattttgtcagccctagttgggacctatcttgggggaaggataccttatcctataatcgctcccgtcccggtacaggtctgtcatcggagcgaccctagacgcttcccggcacgctttagactcaaaaccgtcattccccatgatcacgtcctgctgctgaacgaaagcgctcaatacgttgtatgggtcaatgtctgcttgtgtgcaatgcatcgtttcgttggtgccaagataatgaaagggatcatacgaattatctgggacgtcgagtgctagcgacgcttcgtagttatgaccgtgcttgttactagatatgttcagggcgaggtacagaataaaaattggtctcggatgcggcagacggatcttatatctctctctgctctaagcgctggacttccaatgactaggacggggccaccaactgttgggtaatgggagcactttattggttatagtaccctgttgttgttatccctgttcgacttttgcctcttggacttggggaggcgagagtgggcctagacaaaagtacgtagtccgggatctataccagtaaatgggagccagggtgagaatggggtgagaacggggtgagaaggagattgtttggttatttactacaaatgtgaatgaattatcaccctagttatgaaataagtctgttatttgaaggagtaatatttacatataaatatctcgcaccatgagacatgagagaagtagattctttatctttatttcactatgcaaaacttgatagatattggctggcttgatgttggcgcccgggaagattccacgtttgtaatctaagataacggccggctgcgacgtgtaatctctgagttgtgtgactaagataggcaatatctattattatgtatattcctcggtgggaaaacgaagaatcacactcttcagcggctctaccctcttaataacataaaaaggtatgattctgaggctctaataaaattgcgatacgatgtcgcttctttataaagccggcggccagtattgctagctgatggtgatatcctgagcaccgacaaattgtaccctataaaaagacttgatgccggcgttggccatccagtctattggaacaactatttagcggctaaaatactactggtgttatagtcatagttgatatttgtctttacggatgtagtttgcatctttatcgacgatgttgcttgtcttgaaaaggtcgtgaactttcttgtcagctgtttgcagcttcgttcgatgtcctcattctcatcctagcatttactaagggcgatatttatttatagcctatcggtgataaaagaaaggggtgtgtctggtttaggattactttattggagaatctaagaaagcggatataatgatttatctgggttgttctctagctctatatatttatacctataggataataatttctctgatatcataggattctaataaatcaaagcgtctatcatagaataggtcgacgccatttcctttattcgataagaaaaccgagttcggccgaatgggacgcatttgatagcattatttcaagcagcgatccaatatattctagaggatatctcttatccgtttgatttcgtggaagctactaggaaggatcgccctgttagtttatacgcagagctacatttggcgtattatcttgagatcggccaccgcgccaatctcctactctccggattggccgccaccattttgtccgcgctttttatagaccactatgttcccgagatgcttggttggtcctatctcaactttttataggctgaagctgatattagatagctataaacccctgtatggtatttagaactttatattggtctattattattatagcgtattgcagttccaaggcactatagcctaatgtatatcccgccaaagaaagtgatctggttgagttttatttttcgcgcttatataagcgattctcggagaatgcagtctccttagcgaatttacgtaaagaagaactcaagtcctttagtggccagttatattgtatgcgaagcaattgtatttgtctagtctaccttctacgttctatataatatattctagcgtgtggatatatagtgtgcgaccgctgtatctagattttcggaagccctacctctgggctggagtattagttcacaattaagggctatctctattacctctactagaggccgttagtggtagatattcttccaccgactataagccctataatccttaccatcgatggtagtggagtaaggggggtgatcctgttggagttcctacttctggtataggaatatctacgcctgtgcgcgatataagatgtggtagatcttgtactcggcacaagtttaggtaagttagtaaccttatggtgtaaatatagtttttccagattaggaaacctaataaaggatattataggtggccttatcgcccttaggttattcgcaatgatataggatgttatgtattacttggagcgatttaataccttagcatgtcgtattttccataaaagacgtctctctatcttacctctactgcttcgctaggtatttggctttatatctatctttggggacatggccaaatgggtcaaatagctcctatataacagctactatgattcgcaggtcttcgatgccgccctaaaaagtgcctttagagagcgttgtcgtatttttagtgccacctgagaagatccaccaggaccacgatgctccggcccgaaggtcggggtagtaaccacgagcatttctagggatataagtacttttgtgataggtaacttcaacgtggcctatgactcaggggataaaaatggcaagttcgacgatcatatctgcctatgtttttactaatataactagacttccgaataatacgtctagatgatacttgaaatgaaccaactatgtggcgaatgtaggcctaagcttagcatataccctattttctatagttagtgctaactaaaatctagagtaagagctaccgccgcggctctgttataagtcgatctcatatattattttgtgagtggggctgactattagatcacaagcttttttatgctagcggatctatagggaatcggttccttttaggatagtggactaaagtacaacttcgcgggagagattgcacactaggtcttgcactaaatctagcccacagccatagggtctacaagaatactgtcattgggtactagaaaagtgcagtctaataagcaaaccccgtatttccgccacatcttttgtaacagtttcgtacgttggggatttgatacgtggatattaaccatagagatagatagtgattagagaaaatggcgaagccgtctagataattctattaaaagtaacagttactgtctagatgtgcctttaggaaatataccttataccattgatactgtcgaggttatagaggactatcgcgatattatcatcctctatattagtagtggacgaatagcccgggatatggtaactacactacttatctctagattcttctttattgtcgacttattgctagaaaatactgtaactccattctggtattgcggatcagtgtattataaagggccggctcggatggtgatcttagctttagaaaatctctaccctaataggcttagctatatcttagattgtagattaattgataggtttaggggtctggatagtctctaccccttgtatagatactacagccgctccgttactttcttagcctgccatctagagtataaggtgaatatatatttccagaccagttctaaaaagcgctagaggattagcggcttcccagagagtatggcatcgtttatttcacgataaggcctacggtcttcgtttggttaagacaaccataggtatccctgccgataaccttgccagagctatgacgtgatccgaaatcccgtcaggggtaggagacgtaagcgcgaatcaagaggctccggagatgtttatcccaggaaacgtgcacttgtttaaatcaggatcaaacctagaatttatttatagcgtgttcgataaggaaactctcgggtataaatatgagtccttttttgtctatagcaaaaacttgtaatgtccatgacttataaaatttcgttaccccttttcttgttctaggttcttttactaaatgatattgaagtcatgggtggccccgatccttataggaactcctgagttaaattcgcaaggcggtcctatacattgaaagtcaaggcctatgagcttgctaagttctgcgatacggatatctatgtggttgtcaattatcagtgaggatcgtttgtctataacttagtcgaggatagatcatggccccctaatgataagaagctagtgagtaaaataatgcctaaagtggcttagggtttcggcgctatcaagctaagagactggtaggaatagtagtatcccaatctggaacgaatgaatttcagtaaaatggaaaatctgccagaaagcccggagagtaatttatcttggctcacttgatatttcgccactaggttggagtattttcgattattagaggatctctatagggacatggatctagcaaatgttgttgctgatgaagaggctctatagatcaagtctggtgaatgtgattaatagaatatacttccttttataatacgataaaatatctgctaagattttgtagttacttggaagatcctaccttcactgtttatttactaatttaatcaagcggaacgaaagttagtatagtatagaggggagaatagatggtgcgtaccctttgtgttagattatactttgcttttgtgaaaataagtcaagctctagttgatataatctcttgtgagctgttttagatgtcgtaggttttcttaaggaccaaaggctaccctctattttacagcctgcccagcttacaattgcgaatatggtaactcagtctcctagttatccggatactcaagtcgttggttcgacttacgagcccttcgaatccagttatatgcggatgatcatagaagtggacggaatttcctagtaagataacgttcttgctagtacagtacactggatacttcttgctggatatcttgtgatacctggaacgttcacatctctctaaaagtccgacaccatctataatagcctcgccgataatgaagcaggggagtggattttaaatactattcagaatcctcctcttctcgcaatggtatgtgtactgtttgtatcaggcttggctattatgagctggctgttctgggaatattggggaaattatatttggcttaccaatcgaatctttgtgtgagtatcatctatttattatacgagaactctcttaattatactagtcccatacttcttaatgccttagctggctttcttactacgattattagcctatatactgctcacgatggcgattggtctatcatggtacttttgactgtgattacctctggtctgtccgttgcctgctccctcattttgctatatatttataaatttggcaaactagagagattgaaacaagaacacaatctgatgtttcgcaactacgaacaccccctccatgtctgagagttattctttctctatatcatgttacaggatggatcgaaattagtttcaccacctgcacacggagaatctatctcggaccctctcttgaaacacactatacttattacagttactcttcccctgaacccgtgtcttggcagtaattcaatacacgtgtaaataatagcttaaaaatagcttctgtattagacctgtatggctcttaggcgtctagaacgtttaccctgcaaacaggccaaacacaaaggttgtctgctcttctcgtctggagatgtggccagaattcgaatcccactcccgtcaaccacgcacggtagtcttggcgccattttggaaaggaatagctggatgtggagggaccttgggcagggattagtgggagttccctaaaaaggtgcgacgagcgaccccatatgctcacccttgctcacccctctgctcagcgggcaggggaaataatttagggtgatatgcctggggaatggcaggtattaggagatgcacgtgaccttcgatcttgtaggagcctagcagaacatctgacctcagaaaaagatggcaaagaaatggcacaccttccctcggttatgttatgtaatcaccaactgggatccaatacttcttttacttgctgggcgaagcgatctcttcaaccgagaagggtcagacattttatccggaaaatgctggctggttacatgctcgatctgactttgggatcgggtcgtcccgtcctgggaacgccattaccggcccccacatggaagtagcctcgttacaaacaattcagtaagcggtgtggagaccagaaggcacacttgatctgcctggctgagcacgctagagtcacatgatgacgaggctgagggaattccccctcttttagttcgttggagtcctactgagatttccgtcatgaccaacattagaactttctaaaaacaaatactcctcagcgttttctgctagacgagatagtatttgacacatcgcttactactatatctcgcgcatccgggcattttgttagtcgagcttactacccaccatggctgagagttcccaatctcagccagagcaatcagtgtcagggcaggataaacccggtcccgacagaccaccatgccaaaagcgactccaacatgatgcatataccattggatgggtgtgcgccctcccaaaggaacaaaccgcagccagagccatgctagatgaagagcacgaacctctcccgatccctcgaaatgatcataactcgtacactcttggctcaatacgcggccacaacgtcgtcatagcctgtctgcccagcatgggaaccaaccctgccgcaaccgtcgcgacctctatgataaacacgttccaatcaatcaggttcgggcttatggttggggttggcggcggaattccgccaaaggtcaatctgggtgatgtagttgtcagtcaacctgttgctgactatcacggggtgatacaatgggatatggggaagctggaacgggatgggcggtttgtccacacgggctcgctaaaccgacccccgaatgcgctcctcaacgcgtcgaaccagctgaaaagtaatcatgagatgtacggatcacagataaatgagtacctgattgatatggaaaggaaatttccacggctagcgccaaaatatacgagatgtaagtgcctgcaagacccgttattggtatccgagagttcctggtctccgagggaagtctatttcctgtcttggttgtgggagccgataatcgcaattatcgcatatcttcttggttcatgggccattgatctggtaaacgaggagaatgtgcggttatcagatagggcagacggcgcaagggccccaagagaagtcagggtacaccatggcctgatcgcatccgggaacaaagtgattaaggatgccaaatcccgagacctccttgacaaaaaatacggcggacacttgctatgcgtggagatggaggcagccgggctcatgaatgacttcccatgtattgttatccgaggcatttgtgactatgcagactcgggaaaagaaaaaacctggcaagaatatgctgcagccgtggcggctgggtacgcaaaggaacttttgggatgtgtccagcccagtgttgttgacgctgaagattcagcaaaggccatattagaaaagggttagtgcctacctacctaaatctatcatatacagctgtctaagtaccaagaaatacccgagacgtataaactggagttcgagaaatattctgactgcaaatagtacatcaggggatcgaaagcgtacagcggacaacagctgcaacgagagctactactgattcaatcagatctgaccttcataccgataagatcaagcgctggctttgtgctccggatccatcgtcaaacatcagccatgccaggacgctccgccatgaggggactggcgagtggctgctcgaatcccccggtttccaagcgtggcgctcggggtcacgtcgacatttatggctgcacgggctcgcggggtgtggaaagtcggttcttagtgcgactgtgcttgataatctcacgaacggaaacgacggtcttatccttagcttcttctttgactttagtgacgccgcgaaacagacattggaaggcatgctacgctcgcttgctttccaactttacgacagcgggctggactctgccaatcatctcgatacttcgttccaaacacaccgagatggcagcgagcaacctacgacaaaggtgctctggggtgttgttttcaagatgcttgtagcccagaaaaaggtctctattgttctagacgcattggacgaatcaagaacaagggaagctgtactcaaatggatcaaggacatggtattaagcccagaattggtccatgtccagctccttcttaccggtcgacctgaatccgagtttctgcgcgacatcccccccttgatagggaggcaaaactgcctaccacttgacaagcaagctgtcaactccgatatccgatcgtgggtcacagcacaactttctcaacggagtgattttatacaaaagcccttgtctcagaaactcctggaagagatccggaaaaaggttggcgacggcgccgacgggatgtgagatattactgcttcggtcaatatatttatagcttactgacgacttcatcaggttcaggtgggcattttgtcagttagacagcctgggtcaatgtccttacgaggaagctatagaggaggctctcgaatctttgccacaggatcttgataagacgtacgagcgcatgtttgaaagcataccaacgaagcttaaaagtgacgctatacgactccttcagttccttgtgcactccaagcgacctctgacgctggccgaggttaaagaagtaatagcgacgaagattgaaaacgactcgcaagggttttacaagaaacgtcgattattttgcgagaatgaaattttggcttactgtcccagcttagtgacagttgtccatactgatgttgaagagttatatcttgcccatttttccgttaaggagtaccttctggaaaacgattgtttcaagactgtggctgccagcatttctatcacgaggacgtgcttggcgtatcttacagatataaacggtagcgaaagagagatgatgtagcattttccgatggcaagatatgcggccgaattctggacctgctatgctacgacggctgaggcccacgaggagattcttcaaataatagtcaggttcctagaagaggaagcgacatttcagcgatgggctcgtttgcattaggctgataggagttgggacaaaagccctggtgcgccgcgaggctctaggctctactatgcttgcttgggtgggcttgtggaacctatacggaatcttgttgacaagggagtagatgtcaacgcgcagggcggcatgtatggaaacgccctccaggctgcctccgagggaggccatcaagagattgtcaagctgcttttgaccaagggagcagatgtcaacgcgcagggcggtgactatagcaacgctctccaggctgcctctcatagaggccatcaagggattgtcaagctgcttttgaataagggagcagatgtcaacgcgcagagcggtgactatagcaacgctctccaggctgcctctaatggaggccatcaagagattgtcaagctgcttttgaccaagggagccgatgtcaacgcacagggcggcatgtatggaaacgctctccaggctgcctcctttagaggtcatcaagagattgtcgacctgcttttgaacaagggagcagatgtcaacgcacagggcggcatgaatggaaacgctctccaggctgcctcctttagaggtcatcaagagattgtcgacctgctccaaaggacaggcgctattacaatgccttcaccatagtccgcctctacggctcagaggagcctagccgagaaagcttccctcaaacactctggaccttccgatcacactttgtaaattcttctatgtcacttctactatgtatagtgttcctctatagcctagcttcaagcctcatcactattatcatctcgaaaattttcggtctccatattttgatacataactagtaagaatcccggatactgcgttttccaagtacagtaatagtccattttcgccccgatatatattgcatcagaaatccatatgttaaattaaggacactcccgctaggacccagacacaagatggaatcaagattgcactcaatctatacgacactcaaacaccgtcgacaatattcttagtctacctaagaaattgttacgtaaaacggatttgatcataagtgatgtctcgaaacaagtcggcgtcggctaatttgaaccagggctggaggttacccgaatactcaagttattaactcctcgaacattccatatttagcaaacgaacatgtgcaatgtcaatttgtagttaagttatatattctcgtatatcccaaacttcaggaccaatttctgccttgagtttgaacttcgaagaggtgttatcctgttgctgatcaccttactacacatgaagcgagaatattagctacatcgttcgacgctgtccttaccaaatatagggatcaacggagttgatgcaagaggagagtgtaccgtagcacaaagggcagacttgacgtgatgatgtgaaggcgtgtttcacgtaatttacaaactcgagacacgcataatacgtgctttcaatacaaaacggcatttgaaacgaggctaagcatgattccgattagcgtgttgagaaggagggttcgagaaagaatctgtgcgcgagcggtgaaactgatttcgatccgccctgtatcccgggggtaacggctaggaatgcgtaaaggataaggcatggcatcatattccctagtacaaactacattcaattaatagcaaaaagcttggtaataacgagagtcctgcaattttctgccttggctgcaagtgataaattagaaagagaaccagagtctcgcttaggtctccgtttcttgtgtcaaaaatccccagtgtatgattgtatccagataataaggtataagatactaagtccgactgtctgattccacttgctgaaagaatgtatgctatgtgttgttagcgtgagactaaatgatattgaatagtagcctaacctcaaatatatatgaatataatgatgagccaatatgctctataaagtgggttgtatacttcgacagcctacaggcagcttttctggggatgttttcgggattttttatatatccatgtgaatcacccagttgaagcaatagtgagctaacattttcacgattaagatctatagatgtggtactattattaattatgctgtccccaatatttgctagtgggcttagtgttctatctatataggataatgttgtgtaccacttacctatcttaatagctctattggagtatagaatgatattattgcacttgacgcccctgtgggctatgtagagctgcttgtggatgtatttaaggcccctaagaacacttctgtagatgcttgccagatctttctcacttaattctaaggtgggagttaagccgacttgtgtaagattgatagcgaaaccatggtaattgtaaataaagtgtgtagatatgctattatagaaagcctctaccaggcccactacattttcatataacgcaacttgcagtttggagaagctagcgccctatctgccggcgtctcttcttttaattaagacggttgagtacctaaagtagttgctaaggcttagctatctgtaactagcctgattgatcttctaattcaaagaatacttttgggaaggatgcctaaggtggggtaaaccatacctagatagggttttaatatcaagatcttagtagaaagtgtgatggaaaaacttatatcttaggaatatgcctattgtagctgagactttccaatttgtagctaggatcattcttagcggtagctgttaggaaggaactatttaacccgttaggttgagatatctttaccatagtaagattggctaaggcttttttttctcccaccgatggcaaagagggcatgctggcctgctttatctttattataatagctctccagcagatataggccatttgcctagggtgtaagcgaattatattttgtccggggttatcgatgatttccgaagccatagtggggatgagctagtgagtactgtggtaaggttaatttcacgtttatccttaagaactaggctaaagctctaggcgctcgaaaacagcagaattgcacagacgcaagtagggtcgcggaaacaaaagtacagctgcagatataaaagtagagccgcagatataagagtagagttgcagacacgaaagtagagtcgcgggcacgaaagtagagccgcagatataagagtggagtcgcagacacgaaagtagaatcgcggacacgaaagtagaatcgcggacacgaaagtagcgtcgcggactttctccacttttcgccccacaaaaagctgacaggcactagcccaagctagcaccattacaacttagggttatagggatttgattatgtacttgattttctaccaatcctaactggctaaggcccgctgtattatggttcttatataccgctaggaaagaagcaaataggaagataaagacctataaatccgaccctagtatatgctaaaagtagatgaataagtttctgggcttttcactgaaatgacttattttgctatcacttgttttctaacgataccggaggtaatctacggtgtagtcctcggtcttatggctctcttatttgcattgtactgtcttacattatatatattctcattcttattaacctctcctttcttgtcttcttgtgttcgaccgtttctattgtgctatgtgatttatgcccgatcctactggcatttcgccggtcttggaagtacattaagaacctattcattgttgatagttctttattttgccggcactggtgtctgcaatattgtgcgggtctattccgtttaagatgctagtaagagggtagcgaagctctcactcattaacttatttctaatgtttttgggcggtggttacgagtttagcgcttgtcttcttggagtttccctccattcctatggattcctttatcgattatttgcgcttgtagctctatttgaagctctagcttatattataatcgttgctcgatcaagggcgatatcttaggcgaacgagatgcaattctatggtctcctagtacgttttcttagtgctcctaaaatgtagatggatactgaaattagcaaggccgctagtatgtttttggctttggtaatattgctattagtgaagaaaagggtttatgaagtattccttgtcacctacattggatgtgcggtgacgatgatctacggagtgtggcagtatatccggttggctgaagggaatttttgggtattcctactagtgttcgcatgcaccctggttattataggggttttgcagctaattcgtattatctattgtaatgtggtgataggaagaagctatatatgaatgaatctgcaaccctatatgggtgatattgctcgaatgatactattattgcctagaccgtaggtcgtgcgcgccggttaacgtattaacctaggagttccttctgtgggtatcttttatattttttaatcatacccttttgctattagctggtgggagaatgatgttaatggctgggcggttttaatcttaatcttgcttcgtcctcgttccggtttcatgaagagactcttcgatcgcattgagctaaatagagaatgtagggcctggattgatggcccttttggtctgtcatctgttagttagagattaaactgtaatgtcggcgactatagatatgttttcatgattgctaccggtatcggcattgcggctcagttgctatatattaaggagcttctcgatggccatgaaaaggctcaagtatgtatataggtaatctcgcttgtctggtagttagatagggttggtgattatgagagcgtatgagacctactctagaccctcgttaggtaagataatggatacgttcgtgtctatttctatattggcgataccatctacttacgctgagtagatgctttatgtctcaatttacgatctactacgtgcttacttagaggatgaaattcagtatattggtgagaatgggctgatagatgtacgtagcggacgtgtcagctgggaaaagcagcttgatatagagataggaaattaaatagggaaaatgattgtcctaggtaagccctgttctctccctttattatgaaacgagttcttatcttaaatcagtatgtgtataagtacaaactcggtataatatcaggaacttggtcaggtcacgtgtagataagaatgtcgagctattcgaacctgagttccagccttggggttaaactggaagcttacgcgccttccttaggctgtgagaaaacgaaacgaatataaagacgctagagaatagggtaatgtataatattaggtattgcgaaagtgtagagaaggaattcccatgaatatatagttactttgttggccaaaatctaagtacttaaatacggtggaatagaaaagagtgttctttaatttagtctcttagctaaaatactggatttgtataaaatcacttatattgagaaaatttaccgaccggctaccttcaaccatatttagctgtacgtccggtgcctaacacgtcaataaatgctggagatatgtgggtaatttagccgatcgtaactttaaagtatttactaaatctccaccctgtgatactaaaaatatatccgcgaatgcagggtgcctaaggcgagtattagtcatcgaaatataatccttaaatatataaataaggacagcacttcggatataaagtgttaatattatatttctacttttacaactagtttagaatggcatccaatttgaatcgggagaagcgcgaaacttaatttcctaagaaactgtggcccgataatggaagtatcgttaaggaaagtaccgaaatcgagaaacctaatgagaaattggtctaaaataattatgcgtatcgacttggggtccctattattctaactgaaaatattaacagcttatcaactgtcaaagtagaatcaccggtacagtaccatctatcttataacattgatcaggtaggcctaggcgtgatagggcttaaagatactgagaacctacctacctactttcttaagtagtgtagcatttaaaatacccacgcttttagacgactttaatctgttatacaccaaaacttggtgtgtttgatagaaggcttttaatctggagggaagttctatatcgtatacgaatattatcatttggctattagccttggttgtgtagtaacgaatgttcgcttcagtgaagtagatatagtaactatctgtaaggagatccttagaggggttatttttatctactacgagttgaagacctcttgtcccttgttagattgtagtaatatacttctcacattgaaaggcgaagtcaagataggtataggacttgatgaatatgatgaccaactctgaccattagatagtaaatataggggagtgtttaatgaagaggagatcgggcgacggcattaaagaagacattgaggctattgggtctatcgtgactttattaagtgaccgaccaacttatataggcgaccctaagtaaggcctgggtattctgtctctttctaagttggcgcagtcgtttgttgagaaggcgaatacttctagttctgtagaggatctactaaaggtcagtattatttaaactgaagatgtgaatatataataatagatcgaaaggaagagtttctttatctggtaaacctagggggatgttggagtttaaagcgttattactactaggcatttcctttaggaatctgcattggcaaacgtgttaatgacgtttaccttgacgggatgtgttggatataatataccctaataaattagctattaggaatatgaggagctaagaagaatattaattactacgttcgcaaatctctatctgtcggggctactaaatgtgcaaacgaaatagaacttcgtctgtcgggactataattaaagggatagaaagctaaaaaaatatttgtggtgctatttttgtgtcctacattgttcaccaggaggattatccacggcatgaaggggtctatattctgtacttcgtattctgacatggacatacaactatagtggtgagccgccgtacttgcaatctagactcctgtgctccgattagttcacctgactatacggcttataagcatctatccggtatgttccaagcatggaaggcgatgttgagcgctatactaagataaaagatagtggggcgatacgaggcctgtcggaatttattataggcaaatctgggggtaaagcatctgtcgcagtacctactaggtgtgctatgtagtacgccactatggtgtcgtcaactactgccgctgtctgcttagaggcgtaatcctttagataagagtgaggctcattattagactgaaagggggtgtaacagtgcagataagtggcggatggagtaatatcctctatgagatgaaaaattgattgaagaataagaaaatagttttattccttataactccttatcaggtgccgtgtcctgatgacgctttcccgatcgaatgtctgtaaaatctgcctttctctttcctgtatgaatatcatagtctagaacgtaatcacggagtttatctaatgaaatcgtcccttccatgtcatttccatgacttggattgtctattttcctgataagtattaaccgttcttttaaagctgctttatataccttgttcatatccggagtgcctattccatactcattaatcactataaagagatgattacttgctagatcttgtaagactgctcgtaggttgaatccatcccctaagaagaatttgtaatagacttgtgattcgaataggtataaaacgatcacttcttgatgtgattgataccacgttgaaaggatcttaggtaccttatttcgaacggataggtagtttttcgtttctattggttgagacgtttcctcgaaactagctgccaacggtggagcatcatgatcgggagttccacttgggtgattagctaactctattggcttactggtatcttcctctactaactctggtccggagtttattgagggctggggtgcttccgaaggcgatggattcacgggttgaacttgtagatgccactcttcaaaatctatattagtattgatagatcctagcgcggtcttagtaagccttatgagactttggatagggctagcttgtcgtttatctaagattggctgaaaaaatgaacttttgccgaagaacgacctgataatgtcttttaccacgccgagtgacgttatatattctgacggtggctggttgggaccaaagatttgattgtaaaaaatgtttctgcgctgctacagatactcgtctcgtgttgggctgttaaattggtggcttgcttcgagttctgggttatttgttgtgaattgggctgtactattgtcctccgctagatacctaggaaggttctgtaatatgctctgaagtctatttgatatcgattgtacctttcgctctttgtatttgtagaactcctccctactaagagattcgaaaaagccttgtgctatatgttgccctagatttctgcttcgaagctgcctaatttggtccgactcaaagcctaatcgcgaagctaatatagtaagcttacttaggcttatatctatagtggaacattcaaattgttgacgaaaatttcttatgcggcctccttggtggacgaaatgcctgtaagcaaaaagctaaagctgtagtatagatacaacgaacgggtattcagtttgttgtattgttgtgaatttgtgttctgttgtctggactttaaggagacctccagttccgataagattccattgagtaagtataacttttcgaaggttttgtttgaattttagaggatagagacagtggagcgctcttgctggtctcttaataaacagtgtatcttggataagcgtagtaagggataatattctcctaggtgtttggagaaggcgactcttaaggacttccctgtattgagttgctctaagaagaggaaatatcttttttgaatccataagatcggtgatacgttttcggtctgccacagcgatgctaggtattaatcctttaatatgggatatggaatccgagtcgataagctatctgtcctaagatttaagaaattttgtctatatttctaggactatgtatagataatggtttagtatctaggaagttagctatgtgcgaggtatgcgattatcaaatatacctctgggcattttaggcctaacatcctggtgatttgtgaagattgtagtggcttctatagcctaacgtatggtaataactcgtctaaaatacgacgctgttgatcgtcatgttgtaagcgttgtatttgtttatgacagtcttcggaaccaagtctagtctaccatttctgctcctgagtagggttttgtgaaatttggtatgacctgagtgtacgatatatttcgctgacagtgaagcttatactttgtgtcgattcttcgtgtaattgggcgagtgtatcgattgagatatctataacgttcttagtctctattcgatatttttcaatgctgccctaccatttagataaagatcaaccagccatgtagtttctccaaatctctcgctagcttttagacgatgtttcctgtatacacaagtaatgatatcctctccttctaataggagatttggctgattttttggatcgataagtgcttctggggtgagatttgattttgcaagtgcttttcttaggacctcctagttaatagtcgcggcaactctgtgctcaggctctaggttaccatagccttcgatttcaaatatcctaaaaagtttctccacatttttctcggcgatctcttgggttcccgtgaggttatactctttatatctaagatgctgtaactttatgattgcgtatccctaataacattgtagccgttgaagggcgagggtgtttgttcggtgaccaagaaggttctcgcttgcttccattctcttcttattttgctttaaatgaaagaggagaaaaatcttgacgaagatggaaaggagcgccataataattttaaatgtacctacaacactcaaacccgtgtcgcgctttgccgactccagcgggcnnnnnnnnnnnnnnnnnnnnnnnnnnnnnnnnnnnnnnnnnnnnnnnnnnnnnnnnnnnnnnnnnnnnnnnnnnnnnnnnnnnnnnnnnnnnnnnnnnnnnnnnnnnnnnnnnnnnnnnnnnnnnnnnnnnnnnnnnnnnnnnnnnnnnnnnnnnnnnnnnnnnnnnnnnnnnnnnnnnnnnnnnnnnnnnnnnnnnnnnnnnnnnnnnnnnnnnnnnnnnnnnnnnnnnnnnnnnnnnnnnnnnnnnnnnnnnnnnnnnnnnnnnnnnnnnnnnnnnnnnnnnnnnnnnnnnnnnnnnnnnnnnnnnnnnnnnnnnnnnnnnnnnnnnnnnnnnnnnnnnnnnnnnnnnnnnnnnnnnnnnnnnnnnnnnnnnnnnnnnnnnnnnnnnnnnnnnnnnnnnnnnnnnnnnnnnnnnnnnnnnnnnnnnnnnnnnnnnnnnnnnnnnnnnnnnnnnnnnnnnnnnnnnnnnnnnnnnnnnnnnnnnnnnnnnnnnnnnnnnnnnnnnnnnnnnnnnnnnnnnnnnnnnnnnnnnnnnnnnnnnnnnnnnnnnnnnnnnnnnnnnnnnnnnnnnnnnnnnnnnnnnnnnnnnnnnnnnnnnnnnnnnnnnnnnnnnnnnnnnnnnnnnnnnnnnnnnnnnnnnnnnnnnnnnnnnnnnnnnnnnnnnnnnnnnnnnnnnnnnnnnnnnnnnnnnnnnnnnnnnnnnnnnnnnnnnnnnnnnnnnnnnnnnnnnnnnnnnnnnnnnnnnnnnnnnnnnnnnnnnnnnnnnnnnnntctagtgcgtccctactctccagtgtgtccctactctccagtgtgtccctactctctagctcctgactaccgcgtctactcgccgatagacttggaaaaatgcgacaaataaccagagtgctgaaaataccctatcatggttagtctgcccccgaacccccattcttagcagtgttccagtacagtggtaaataacttagagtagcgtctgtattagactactgtactgtagtaaggtctacaaggattcaagttgcttagtggtactccagtcagagatatggaattcacatgtataaaagtgcagaacagatacgtactacagtacgttgcgaaaccggtgcaaccgccttcactcttcgagtgtttctctaggcgcaccgccaagataccctagaacatatgaggaatggtcccggaatatcaatattccgctagcagtctcgttactatcatttcctttcattaaatacgatgccttgtctcacaactgtattggtaattcttgagcagattcaaataggccaaacaccagagcaggggtttgtctcgtgaatctggtgaatctcccacatcctttgtcgacttgcgaatgtccctcgttgaacagaagatcacccacgggcagtagttcattattggatagaaatgtaacgttgcactatatctgtctataaaactttcgaatctttgaaagcctggagtttttggtgaacacgcacgcttgtttcttataaattctggactttcaatcattggacctcaagaaccgggaggagatgtatatacatatattgcacattgggtccgacactaatccctgcagtttataacacaggacctaattattagtctacgaatttctttcgttattcgtagagatatttgcattagaaggcagcccctgcctaaggcccgggccgaaaaaataggaaagcggagagcgagcaaactatttgcctgatggctagattaagatttatcaagcgaatcagacggggtattcaatatttcatgaagtcaccctactcccgcttgctccactggaatgtaggacatgatcgagatgacgtcacaacagtacgtacagccttagaaaggcaggaaagaatttaacagtcaattggctagcaatgtaaacttctgtaacaaaacgtgcgaacgatcagttttttcggtatacaatttcgaggtctgcgcgcagagcatgctcgtgctagagctcatgagggcccgtcacagtgctatttccttccctcaatagattgacatgatggagagcgaacttcgtgacaatatttgcgcacagcagttagcagatgtgctcccggtcggcgtggcgatcgtcaacgcgcacgacgagattgtcttcgccaaccgacgctttcatgagcttacgaggagccaccaaccaataggactggactgcctctcgcagtcggtccacgcagacgattatgagcatatagcccaggcatataatgctgcggtatatacgaagatggcgacccggagagaataccgggcttttgggggagcggaggaatggcgagggctgtcgctgacaccactaaacgacgacgatttgaagcagttcgagctaaacggtgacggcggtctgatttgtgtcattagtgatatcacaccggagaagacagcagagatattgcagaggaagattgcgaatgatgccaaagagcggaagcagcaacaggaacgctttatagatatgataagccatgaagtgcgcaatccgctctctgcgatcctgcattgtgcggaggatattatggatattttgcaggatggagcgcaggacgatgggaaagagaagatggccaagattgccgaagccacagagacgataaatctctgcgttgcacaccagaaaaaaatcattgacgatgtgttggtttactccaagctagatgcgtcgatgctgaagctagccccacaagaagtccagccaaagtcgcatgttgcaacgctgctgagcatatttcgccctgagctgcgcaagcagcagatcgaattcgagtaccttcttgacacgtcttacgcagattgcgacctcgactgggtcgtcgccgatctcgacaagattggccaggtattagtcaatcttgtctctaacgccataaaattcactgccgaatctcaaagtaagaggaatattcgggtctctatgggagctgcgaaagtccgaccgccatcatacccgccaaatatcgtctttttcgagccgaacgaagctgctttgaagcttgattgtaccggaggccctgaatggggccatggccagactgtgtatatcatggtcgctgtgaaggacaatgggatcggaataagtgatcagcatcagaagctgctattcgagcgcttcaagcaagctaccccgcgcacggacagggtgtatgggggctatggcctgggccttaacatcagccgcagactgtgccacatgcatggaggtgagattggtgttagctccaaggaaggcgagggtagcacctttggattttatttcactgtccgacggtgtcccgatacagacaacgccaaggtggacagagagtctcctgttgacaaactgtgccatcaggttcgggagctcgacagtaaaatcccggacatcagaagagacacgtccatggcaaatttttctgaagaaccgccaataaagcacgtcgatgaggtcgcgatcggcactgagagtgacgaccgaagagagcactcagcgaagctgtcagaagccgctatacgagataacagccctgcaatagatcggcgcatgtcgaacatcgacaaattttcacccaaacaagagcccaaggctataacagaaatgtctaaactggaggaaccacaacgcattctatttgtcgaagataacgtcatcaaccagcgggttcttgcgcgcaagcttaagacagcgggatttgaggtcaccacggccaacaatgggcaggaagcccttgacgcgtggaagcacgattcatttgactgcattctcatggaccaggaaatgcctgttatggacggaagttcggcggcgcgagagattcgggcgctggagaaggacaatggaacgcatacccccatattaggggtcaccgccaacgtgcggcagaaccagcaggcagatatgctggatgcgggcatggatggagttgtacagaagccgtacaagatgcaggatttatgtgacaggatccgtcacttggttgccgcaagagtcggtggaggacactcgcagagtcatcgcacatcatagtcgaggccatctagtttcgggggaaatgcaaagcacaagtaaaggaataacatcggatgtccctttatgtgccaatatccacatttaggactacgaataaaattccgccgagaaaccacaaccaatcataatatacaatcgcttacggatgtgccttgtcaaacatttcgagttgcaggtactactgtaattacctagattcgtaatgtcggactttcggcaccgttgacacgaaggatgttggccagtatattttgtcttctgttcactttataattattgttgttgttctattttatgttttattttgctatatttaagtgtcacatgcccggctgacttttcttctagaaatgaaacagtcgaaattcggtccccgttgaatatcaattttatccaagttcaaagggtgtgtagcatagatatccatgactgggagggtcgggcctctgaacagcaatcggtcctcatttgacccaaaggtttacggatcactgttaagctctaggtatgttatagcaacgagtgacttgcctagtagtctaagatccctacttcaggagttggaagcggacctctcatcatagtctattagctatcactcgaggtttccgagcttctttatcaggtggtttctctaggacgctgtccagatatgagtcgagctaactaattattatgccggtaaaagacgggaagctgttagggaggggtaagcgaggtgtcaggtgtatgtattaaatttacaaatgaatacatttcgaaaatcatttatgtacagaacgtgcgtatgattacatacgcagctcccggtataactccaaatatggactagcgtttcctggcgtaaggagcaggaaagtcaatcgaagagtgaggtggttgcaccggtttcgggacgtactgtacagaacttagactcatgacagtgttcttatgccaattcctcctataacctaatatctgacaatcttgcccttagtcggattttctgatccgccccgccttgagaactcgaaatgagactaatatataccaacaccaccaaatagatgaacacacaagcccctattatgttgcatagattcgttgatgcgttggcattcgcgagaagtaacctaaaggtcccactcctgctttgcctaaataacacgtcttttaaatatgaaatgatccttcttcttgtagatgaactctcgctgatccttcgatgacagaaggttggtttcctctaagcaatttgtgcatagtgtattgatgttgatgcgccgcttagcagggagtaaatacgaccaaacgcaaacaaaataggatccaggctcgtttcctgtgaatttgatcttcatgcgatgggaatcaatatcatgacaagacacgcaaaaccaggtgacagttcccttcattctaggcgatgttagcatgtatagtatttgctagatattatcaaaacttacgttcaagcctaacggactttgggatacgtgatctaagattaatgcagaagaatacctgccttcatatgtctaaatcaggctgtagactaaaaaatcatcaaactgtacgagcaatttataggatagcgctaatacttgagtttatagtgcgattcctagagcagtaatcctaatctacctgagtaccatgccgctacagataggtatatgatggtccgtgtcacgatcccacatatctgtctagacaaagctacatatcagggggtagggatgcaagctggcttaggagctaaaattaagtcaggaattagtgggacctcgatttaaaaagtgtgttgtaaagcatgtcgcaaagcgtgtcgtaaagtgtgtcgcaaagcgtgtcgcaaagcgtgtcgcaaagcgtgcnnnnnnnnnnnnnnnnnnnnnnnnnnnnnnnnnnnnnnnnnnnnnnnnnnnnnnnnnnnnnnnnnnnnnnnnnnnnnnnnnnnnnnnnnnnnnnnnnnnnnnnnnnnnnnnnnnnnnnnnnnnnnnnnnnnnnnnnnnnnnnnnnnnnnnnnnnnnnnnnnnnnnnnnnnnnnnnnnnnnnnnnnnnnnnnnnnnnnnnnnnnnnnnnnnnnnnnnnnnnnnnnnnnnnnnnnnnnnnnnnnnnnnnnnnnnnnnnnnnnnnnnnnnnnnnnnnnnnnnnnnnnnnnnnnnnnnnnnnnnnnnnnnnnnnnnnnnnnnnnnnnnnnnnnnnnnnnnnnnnnnnnnnnnnnnnnnnnnnnnnnnnnnnnnnnnnnnnnnnnnnnnnnnnnnnnnnnnnnnnnnnnnnnnnnnnnnnnnnnnnnnnnnnnnnnnnnnnnnnnnnnnnnnnnnnnnnnnnnnnnnnnnnnnnnnnnnnnnnnnnnnnnnnnnnnnnnnnnnnnnnnnnnnnnnnnnnnnnnnnnnnnnnnnnnnnnnnnnnnnnnnnnnnnnnnnnnnnnnnnnnnnnnnnnnnnnnnnnnnnnnnnnnnnnnnnnnnnnnnnnnnnnnnnnnnnnnnnnnnnnnnnnnnnnnnnnnnnnnnnnnnnnnnnnnnnnnnnnnnnnnnnnnnnnnnnnnnnnnnnnnnnnnnnngagctgggaaagtccgcccgccatcatccccgccaaatatcgtctttttcgagccgaacgaagctgctttgaagcttgattgtaccggaggccctgaatggggccatggccagactgtgtatatcatggtcgctgtgaaggacaatgggatcggaataagtgatcagcatcagaagctgctattcgagcgcttcaagcaagctaccccgcgcacggacagggtgtatgggggctatggcctgggccttaacatcagccgcagactgtgccacatgcatggaggtgagattggtgttagctccaaggaaggcgagggtagcacctttggattttatttcactgtccgacggtgtcccgatacagacaacgccaaggtggacagagagtctcctgttgacaaactgtgccatcaggttcgggagctcgacagtaaaatcccggacatcagaagagacacgtccatggcaaatttttctgaagaaccgccaataaagcacgtcgatgaggtcgcgatcggcactgagagtgacgaccgaagagagcactcagcgaagctgtcagaagccgctatacgagataacagccctgcaatagatcggcgcatgtcgaacatcgacaaattttcacccaaacaagagcccaaggctataacagaaatgtctaaactggaggaaccacaacgcattctatttgtcgaagataacgtcatcaaccagcgggttcttgcgcgcaagcttaagacagcgggatttgaggtcaccacggccaacaatgggcaggaagcccttgacgcgtggaagcacgattcatttgactgcattctcatggaccaggaaatgcctgttatggacggaagttcggcggcgcgagagattcgggcgctggagaaggacaatggaacgcatacccccatattaggggtcaccgccaacgtgcggcagaaccagcaggcagatatgctggatgcgggcatggatggagttgtacagaagccgtacaagatgcaggatttatgtgacaggatccgtcacttggttgccgcaagagtcggtggaggacactcgcagagtcatcgcacatcatagtcgaggccatctagtttcgggggaaatgcaaagcacaagtaaaggaataacatcggatgtccctttatgtgccaatatccacatttaggactacgaataaaattccgccgagaaaccacaaccaatcataatatacaatcgcttacggatgtgccttgtcaaacatttcgagttgcaggtactactgtaattacctagattcgtaatgtcggactttcggcaccgttgacacgaaggatgttggccagtatattttgtcttctgttcactttataattattgttgttgttctattttatgttttattttgctatatttaagtgtcacatgcccggctgacttttcttctagaaatgaaacagtcgaaattcggtccccgttgaatatcaattttatccaagttcaaagggtgtgtagcatagatatccatgactgggagggtcgggcctctgaacagcaatcggtcctcatttgacccaaaggtttacggatcactgttaagctctaggtatgttatagcaacgagtgacttgcctagtagtctaagatccctacttcaggagttggaagcggacctctcatcatagtctattagctatcactcgaggtttccgagcttctttatcaggtggtttctctaggacgctgtccagatatgagtcgagctaactaattattatgccggtaaaagacgggaagctgttagggaggggtaagcgaggtgtcaggtgtatgtattaaatttacaaatgaatacatttcgaaaatcatttatgtacagaacgtgcgtatgattacatacgcagctcccggtataactccaaatatggactagcgtttcctggcgtaaggagcaggaaagtcaatcgaagagtgaggtggttgcaccggtttcgggacgtactgtacagaacttagactcatgacagtgttcttatgccaattcctcctataacctaatatctgacaatcttgcccttagtcggattttctgatccgccccgccttgagaactcgaaatgagactaatatataccaacaccaccaaatagatgaacacacaagcccccattatgttgcacagattcgttgatgcgttggcattcgcgagaagtaacccaaaggtcccactcctgctttgcccaaacaacacgtctttcaaatatgatttgatccttcttcttgtagatgaactctcgctgatccttcgatgacagaaggttggtttcctctaagcaatttgtgtatagtgtattgatgttgatgcgccgcttagtagggagtaaatacgaccaaatgtaaataaaataggatctaggctcgtttcctgtgaatttgatcttcatgcgatgggaattaatatcatgataagacacgtaaaaccaggtgacagttccctttattctaggcgatgttagtatgtatagtatttgctagatattattaaaacttacgtttaagcctaacggactttggaatatgtgatctaagattaatgcagaagaatacctgcctttatatgtctaaatcaggctgtagactaaaaaatcatcaaactatacaagcaatttataggatagcgctaatacttgagtttatagtgcgattcctagagcagtaatcctaatctacctgagtaccatgccgctacagataggtatatgatggtccgtgtcacgatcccacatatctgtctagacaaagctacatatcagggggtagggatgcaagctggcttaggagctaaaattaagtcaggaattagtgggacctcgatttaaaaagtgtgttgtaaagcatgtcgcaaagcgtgtcgtaaagtgtgtcgcaaagcgtgtcgcaaagcgtgtcgcaaagcgtgtcgcaaagcgtgtcgcaaagtgtgttgcaaagcgtgtcgcaaagtgtgtcgcaagtgttgcgtgtgtattgccacggtttttatcacagtgtatcaggagatgtgtggacatttaaattcgcagatatgccgcacaaaatcgtcgcttttcacaatagcttaaggctggagataccaatccgtctatcatccttcaatccttataaatattggaaatatgaccttctctatattcctacttcttactagcgtctatatacgcgctgccttaggtggtagtctcacggttatcgattatgatcgcgaatgcgtggtatggtctgatgataactatggctgcacgggatatttatcatcttttggcctccttgatggagacgattgttctggtgtgtaatggttctaccgatatactattagtactgatgaaaccctagatctaagcatggttatatatggtatccgtaaggactactctaagctcgatataggcgtatacagcagcacgaaagacaacatcatacctattgcatagatagatataaacgaaaatgggatggttaaattctataaccaaaatgaagacgagatagggtgtacattggataacggatttaaggttggcagcttgtgtattgcttccgacctgtctttaccgtctttatcggcggctttatcggaatctgcaccttctacatcggcatcgtccttatcggtatctttatcagaatcgtctttatcggtatcgtctctattatccacttcagtatcatcaagtgaaatatctagctgtactaactctggataagatgattatcgggtgactatgcaaatggccttgtcccttagaatatcatttatgatatagctcatcctcccgctcttggattgaacgattactcttactttcttttcctacttagatagaaccgcgttacctgaccctatagtgtacagagaaaagatcgatagtatatagatctctttggatatggttttgcctaccgggttttctatatcactagcgtgaatacgaaagagacttcccttactttttgcttctctataaatgttatagcagttgagcctagtgacctcgttttataaaaccgggttttgcaagtggatgcgcttgattggtgtagactgtcgatctggtaattaggaaatgagactaatatataccaacaccaccaaatagatgaatacataagcccctattatgttgcatagattcgttgatgcgttggcattcgcgagaagtaacctaaaggtcccactcctgctttgcctaaataacacgtcttttaaatatgaaatgatccttcttcttgtagatgaactctcgctgatccttcgatgacagaaggttggtttcctctaagcaatttgtgcatagtgtattgatgttgatgcgccgcttagcagggagtaaatacgaccaaacgcaaacaaaataggatccaggctcgtttcctgtgaatttgatcttcatgcgatgggaatcaatatcatgacaagacacgcaaaaccaggtgacagttcccttcattctaggcgatgttagcatgtatagtatttgctagatattatcaaaacttacgttcaagcctaacggactttgggatacgtgatctaagattaatgcagaagaatacctgccttcatatgtctaaatcaggctgtagactaaaaaatcatcaaactgtacgagcaatttataggacagcgccaatacttgagtttatagtgcgactcctagagcagtaaccccaatccacctgagcaccatgccgccacagacaggtagatgatggtccgtgtcaagaccccacatatctgtctagacaaagctacgtatcaggggtagggacgcaagctggcttaggagctaagattaagtcaggaattagtgggacctcgattcaaaaagtgtgtcgcaaagcatgtcgcaaagcgtgtcgtaaagcgtgtcgtaaagcgtgtcgcaaagcgtgtcgcaaagcgtgtcgcaaagcgtgtcgcaaagcgtgtcgcaaagtgtgttgcaaagcgtgtcgcaaagtgtgtcgcaagtgttgcgtgtgtattgccacggtttttatcacagtgtatcaggagatgtgtggacatttaaattcgcagatatgccgcacaaattcgtcgcttttcacaatagcttaaggctggagataccaatccgtctatcatccttcaatccttataaatattggaaatatgaccttctctatattcctacttcttactagcgtctatatacgcgctgccttaggtggtagtctcacggttatcgattatgatcgcgaatgcgtggtatggtctgatgataactatggctgcacgggatatttatcatcttttggcctccttgatggagacgattgttctggtgtgtaatggttctaccgatatactattagtactgatgaaaccctagatctaagcatggttatatatggtatccgtaaggactactctaagctcgatataggcgtatacagcagcacgaaagacaacatcatacctattgcatagatagatataaacgaaaatgggatggttaaattctataaccaaaatgaagacgagatagggtgtacattggataacggatttaaggttggcagcttgtgtattgcttccgacctgtctttaccgtctttatcggcggctttatcggaatctgcaccttctacatcggcatcgtccttatcggtatctttatcagaatcgtctttatcggtatcgtctctattatccacttcagtatcatcaagtgaaatatctagctgtactaactctggataagatgattatcgggtgactatgcaaatggccttgtcccttagaatatcatttatgatatagctcatcctcccgctcttggattgaacgattactcttactttcttttcctacttagatagaaccgcgttacctgaccctatagtgtacagagaaaagatcgatagtatatagatctctttggatatggttttgcctaccgggttttctatatcactagcgtgaatacgaaagagacttcccttactttttgcttctctataaatgttatagcagttgagcctagtgacctcgttttataaaaccgggttttgcaagtggatgcgcttgattggtgtagactgtcgatctggtaattaggtgatgcccgggcaattactttactcgcaaaatgctagataggattagagcgagatttagcacttaggcctgtacttcacatatcactaagggcctgcctagaaacggtgaatgagcctgtgaaatgcatacttatagagccatgccgaggggatgtacatctaagggtgtcaggtgctactggtctatacgctgtgatttttatacggacatccccctagatgcccatccagatcgcatgatgatcgcacagttacacggaagaataccccagttgagatcctcgggctagctagaacgtgttgttgccctctccttgtgcgattgtcaaacacaatagaacagactagcgtatcttggcactagggttcgagaatccgtcgtggttgtatgagcctcgctctgtgctctaaaacttgtcacctgtaaatgaagcaaagcgcgcatcagaaggctgcaagatttgagagcttgttcactaaaggcttctttctgtacggtgaaagactaccaatctttgaacccccgacggctgtgagacatatcttttcctcgaccacacttccggcaccttacttgtaaaaccgacattggtcttctaaggccacaattctcacagtctcctaatagcggagcatcgaaaaatgtgtcgagcatttctttcacaaattctggcacttgggcggcgattgaatcgtacttcgcgcggacggatgtgtctcgtaaatggaaccccagtttgtctctcgacaagcaaacggcgaactctttgagccccttggagttgctgaatggcgagaaaaagacatcgggtattgaatcaagatactcaaaggggtcaaagtgacctacagttctgttcaaatatttccccatggccgcgtcgcaaagctcggggatgcagtatttatcgcccaaagcaaacaattgtgcatgtaatcgaagagcagatattgacaacagcggcacattaggtgagacatctgtcggactatcatcaatgagctctgaataatcacctgtgtataagtagtccagcatctttttaacgacgggaatcgattcatccgtcatctggtacgtagaatctgctgcttcctatatttaaactatgtgagatacgaagagagaaagactggcttaagagataacttgccctaaaattcccggtgcaagcggcccgaaagataggagattgcgaacatagtatgactttatgcacgccgaaatcgactccatcacacataattttgaaatcggtgtaatcgcctctttcgcgacatcttctgttatttagtaaagttttgcaatgtcgcggagaacgtactctgaaaccctattaatgatgcgctgaggttgtgatgacgaagtgttggacatggctgcgttaacagtatttggaagtaaaataggcaagattgtcagaaagagctagttgggatttgaatacttttgaaatgttttgaacgtcagactgtagcaaaccagagtccgagtatccagtaaatgtcttgacgtagtaccttctgttatgacgtcaaataacgcaacacaaatctgtgttgtctttcactgagccaaacgtgtttgatgaatcttacaaagcttttttatcatgtgactcaatattacaatacatttcgatatcttgaaattgtctaaatcaagaatagactagcgagtgtcagaattgagtttgggaaagaatttaaagagagtaacgtagtgaaactgatttcgagcgcgtctgtacctgcagactactcataaacctgctttttatatatttcgaaaatttttcaaaaaggcccttccaaacagagaggttgggaaaatcgtacactttgtagtgtcttgtcatgccagtacgtggtgtcaacaataaaggtatagagaagtcgagaaccccctctagagaagacggatgacggtgggttgctatcgtcattatctggagtgaggatagtacactactgacgtccactatcacaaaatcctatgaatgaaactctcccagattcgtgtcccaaggcaagtgtagtcccgttaatcgctgaacaccaaggccgatattcaggaggaagccacagcacctttctgcggtgaagggttatccactgacgattcagaataaatatcccggcttccccttgagataaattggaggtatgattatcacatccggactgtgttttaaggtatcccagattggtgctcagatgtgaatcatctcggacaaattccaggttggtgaccagcccgtgagcacccaaactctgtcgcagcgcgcctgtggcagtgtcccagagcctgactgtcttatcatctgagctagacgccaggagtcggccgttagaggagaatgcaacagatcggacattgtctgaatggccggagaggacctgttgcagcgcgcctgtggcggtatcccagagcctgaccgtcctatcctttgatccagacgccagatatcggccgtctagggagaatgtcacacaacggacttcatctgaatggccatcgagaatctgctgccacgcacctatagcgacattccacagcctgactgttttatcacttgagctggacgctaggagtcggccgtcaggggagaataccacagaccagactatacctaaatgacccttaagaatctgctgccgtgcacctgtggcggtatcccagagcctgactgtctcatcatttgagctggatgctagaattcggccatctggggagaacgccacagactggacacaacgtgaatgacccttaagggtctgaagtagggcgcccgtagcggtatcccatagcctaactgttttgtcgcttgagccggacgcgaggagctggccgtctggggagaatactattgaccagacccaatctgagtgaccatcgtgggtttgctgccccgtatccgtagtggtatcccatagcctgactgtcttatcttttgacccggacaccaggattctaccgtcgggagagaatgctacagactggacacaatgtgaatgaccctcaagagcctgctgcagcacacccgtggcggtatcccacagccggaccaacctatcgtttgagccggacgccaggagtcggccgtctggggagaatgtcacagatgcgacccaatctggataccatattgaatctgaatggccatcgagagatcgtcggagcgcgcctgtgtctgtgtcccagagcttgagtgtctcgtctcttgagccagacgccaggagcagacagtctggggagaatgcaatagaatggacggagtctaaatggcccctaagagtctgctgcagcgcgcctgtagcggtatcccagagtttgatagtcctatcatttgatccagacgccagatgttggccgtttgaggagaatgtaacagaccggacattgtctgtatggccgtaaagggtctgctgtagcgtgcctaaggtggtatcccagagcctgactgtcccatcatttgatccggacgctagatgtcgcccatcaggggagaatgccacggactggacagactcggaatagagatcgaaagtctgctgtagctcacccgtagcgatattccatagtcgaaccgttttatcacttgagccggatgctaggagtcggccgtcaggggagaatgccacagactggacagacttggaatggccatccagggtctgctccagaacacccgtggcggtatcccacagcctgaccgttttatcactggagccggatgcgaggattcggccgtctggggagaatgccacagattggacgcactcggaatggccctcgagagtctgcatttctgagctccagatttcctcaacctttggaaacctacatatccaactagggagctcttcttcaaattccctccgaactattgccaatctaggtgcaaatagaagtcctgagtgataaagttggaggggcgcctcatcagcgatatgtctatttttaaggacaaaccgcctgccatcatgtagaagattggttattttataatcctagtcaccctatattagtaacggcatgtaatcacataggttttcctatagaaactgacacttatcaccagctgtaattgatcgatgatctccagaacttctgacacgacgcctagaatgctcattgcttccatccaatgtatgaaatgctcccggagaaacaagaagatctcctctattgcagcagcaaaattcttactctgtgccagatgatgtacccaatagcgacaggaatattgtagctctggtggtaaatgctgatggatagacatggcatcgatctcagttctttgtattccatagcccttcaggttgcaaatattcttctttaagcgaccacgcatggtgataagacagcgcatggcgatatccatatgtttcttgggctcgtccacaaggaatctgctctgggatcggaccaagaaatttcggaaggacaaatgtaaaatcctaacaggcagatctcgtttcttcggaacgcttagaacagattgaaataaatccaatcgattgctgattaggtctggctcaagcccaagaaatagggagagcgcattgattgaaagtggaacagcgagaagaatgatgacaccgactatttcctggaactcttgcaagagctgctgctgttctgactcattattgtcttggtcatctatcagttgcgtcagaattggcaggtacgtcttgtccattttagcggcatatttagcttggtcctttaaaagctctgtgaggcgtgatgcaggttcccattttagattctcgatgtatcggcacacggtggcggcacaaatgaacagtggaactgacatcttaactaattgttggatgatgtcatcgcccggccagtctcgacacatatttctatcgtgtctgatcttcgcaaatctgtccttcaggaatagatatatatcgtgttctgtcgcttttctggagatatcatgaagaaccaggtcctggtaatcatggttcgtgatctctaaaaagccgaggcgaatcgacagttcaggtcggcttgtcaagaatacacgaaggcgaatcgcgggtgccttttgtagaagaggcaataatctgattatggttcgtacatcttgatcatgttcacattcgtccaaggcatcgatcactatcacagcggtatgaggagattgctcatcgagttgcttaaggtcaagcaatggttgaaggagtattttatcaaactgctctcttagcgattttgaagcaatgtctgggtcgccatggagtgccttctgcagaccagcacttagcccagagaaatttagcactagttgccttgcgagtgttgggagaagttttgtggcatttcctcgatcaccttcaccccttttgaagaaaaagcttgctcctaggtgtttggtctccttgagcgattttgccacagttcgagatatcgtggatttcccagttccagccattccatttaaccaaaagaggcactttgtgttgggtgaaaaggcccattcttttatctgttgaagaagttcggtcctcgtgccttgcagacactcatcttcatgttgatctgggtatgagttgtattcggccccacgcgcaaagggtaacttgtcaagaaccatcttctgattggcatgctcaccatgctgaatcattcctgtgatgagcgttctagatatcgtttaatcaaatatcctcaagcaagagcatgttatccgcaaaaacatacgtctgatcaagctgcaacgacaagttaaaggacgacttgtatctttcaagattctgaacaatagcctccatctctgtgtgtttcaagggccacttcaaggctcgaagtcccatttttctcatcagcgtctttcccctccctggatcaagtttcgcttctaaggctcggaggtcggagaggcaatcggtaatattactgactagacgcgaagaagcaggtagggtgttgctgtggctttgaagtaatttatcgaggtcttgcagaattccttggacgcccgaaatcgccctttgtaatttattaatctcgtctcgtgcattgtttacctcctggatgtagcccccgcaaatcttcaccaggcttcccgtcagttgaatgaccgcgacaacgctcgctgccgatgaaagtaaatccatatggaagaacgggcggcataaatgcttaatttcatgtaagtagggaaacagatcactatagcgtgggattgtgttcggtttggtagtttgggctttccggcgagaggtaaaagaggggtaggttaggcggcgggagcgaggctgtgatccagggtgcagtttcgagtgctaagttgaccgaccaatcacgaattcagccgttgacgcactccaaaaggccacattgggataacccgttcttatttctagtggatactggctggctgttggctcaaatgtcggcccgaaccgaaccgaaccaaacccgtctcgccagacccatctccgttgcgatgcgcctctggccacctcatcaacttttcggtcgaccgcgcgacatattatggcgccccaacttgcacccccgccatcccgtcgaggtacaaggtgggcttttcgagcaggtgatcgcacaacgcctcaagcatgactggagtgatgctacgttgtcgtccacctttattaagcggtgctttgacgctgccaaacatccgtatattggaagagattctcaggatggtactcttatttgcagccagcagcctgcgccatctgcggtatggacagctccccaccgtgtatcatgtcataaataagatcttgctttgagggagctaggtttggggtcatcttgattcaaccactggtgattgatcgttaagataccctccgtcgggtggttattttgaaggtgggtgagacgtattgattcacacgcaaatacatacttgaaagtagtaacctacgtaagaagcaatacacgcccaactgacaggggtactccggaaaaattcccaaacagagactagcgggtcttggcattgtgattcgagaaacaacgaaagagtgtagcggtggcaccagtttcgggacgcactgtatgccgtcaaaaattactaacggacatctgagatgacatatattgcaaggctttatgtatgggctctgaggagacacagtactatatatattatgacatgtatagtagatcagagatagttgccctttcggcttagccgccgggcgttaataaataaattgtgtgtgtgtatgccgtcaatctaacatcgtttaatcgtgtaataaatggccaggaatgacgatgagtgcaactccaagcaccatcgtttcttgtaatcgtcattatcaacgatataaccctgtcaatgctctgcgcctagtcgtcatccaagtgtataaattccataaataaattgtctgcggaggttatatccgaatctttaaaactggttggcagagtgttggtgagaaaataatcctctaaactcggcaatgtttcattacttaaattcctaaaagtagttcctgcaggctctgactgaagctgccactttctttttcgtttaatacaatttgactggggctcttctatggaatgtatatcaaagaagtgccactggagatataagttattaatatacttcctttcttcgcaatatagatgagggcagaagactgtggctaaagagaccgctgaccctaagtgtttatcaatgtgattcagaagagttgattttgcaacctattgttaaaatctcttgtctggtttcttacttttatcgcctaggtagaatggacagaatcctagcgtaataagtgtggagcggaaagtcaaaagaccacattgggggttgaggttgtcgagatagtatttgtaatgattctcctaggaatcttcgttaaggaagagtttagtgtaaagataacaaaattaaacaaagctgtgctgtacgtgtcgataggcgcgcttttcgttcttatagcgctgctagtattatataccatttaaggattttcttcgatactgtagtatatgcttggctctcccttgtagtggaatgctgtcttcttgttaactttttgatctataatactcttcgggtatacttactctagtatagacttattgtatattggataacggccttccttaggggctatgccggggtagtaaatggcacgttctgtcgatatacaaatagtaactatatcttctaggcactgtcgactaagtttactatctagagttgccttctttaataaattcttgctgagacgggagcgctctggtagatatttcttatagatattgaaaagaggcgttagattgcgttcggagaagttgttcccagacacgtactcagtgtatgaagtatcctaccagcttttgataaagtctttcttctaggtgagcaatctctttgctttcttattatagagacgatcctgtttaaatataaggtccctattctcttctagtcttctagcaatctcctgcgttaagtgggtaattctctggttaatcttaataatttcatcgttagattcgaattgtgcggtcgtagctgtattaagttttagcggcacattcgagtctcggtgataagacatgctttgttccatatcgcggcatttgtagttagggtctaaattatagaataaggcttgtatatctaatgccttaagagaagactgatattttagataggtgttatgattctaatgattaagagcctggctataagtagcctgagaagccttggctaaaattccttagtaaaattgaggtgtaacggcataaatatacttacagttgatcttatttgcaatacctcctcgaattccatgtatatataactggtctttaaacctatcccgctgggccaaggtagtgaagttgtgctgtaatgaggagaaggttaacgccttcgttaggtcgggtccttaagcagtgacccttctgaagaatggtaaatcctttgtggtttcattctattctaaggtctatgactctcttctgttaggtggctttgcagtaagaaccttggtcacagtggtaagtcctttaaaggtaccatccgctatcctatagacgattacctagaaaataaaactcatcctaagcaccggatgctccctgaaccaattttttggtctaattttattatattagctatttctggatagaatgattatagctcgtaaactcacaaggtagtatcgtcgcgataacgccagcctttcaagaatttgggatcaattattacctaacgtatcagagaccccctttccttactctatttgagatgaaatgaaaggtgctgataattatcagttagatttgatataattaggaagcgtaatcgtcaagatataaaccctataatataagcatttatttgatttgcgataagtacttgatttaacgatagcccctgctcttgtacctgagctagcaaataaagagagagaacttgcggtctgtacgcgtgctctctcatgtatataattgtgacagttatttataaataggtgtcgaagtaggtaagctatgtcctttccgttgactaggaaccgctctctgggctttgtagggagcttatattccactatgagttcggttctaatatacttttgtttttgttagtagcgagctcctaaaaggataattgttacctcttatattaagaatgttgtccttaacttccttgggaagggatcgagaagtttctcgctcccacttcgatgtaaagctggtgaagtgattataagctgactgctaagacggaacctttttatacgatttgatataaaactctacgaaaagtttcaaaagttcaggagtcggaacaggcaggttaggaaaattcgggtctgtggactcgttacgggaaatcctccatctactaataattaggaaccaaaatcggcgaaatccgagcgaagcttacagtgcctaattgtcaactgtacggttatatttttctagcgtagcaggcgctagctcagggtggcacacagtattaccctctttttccttctcgtcttgatagtcacgtgtgaagccatgtgatatcgcacgtgcgagacgctcctggagtgctttcgggatattcttttcggagaacatgttttagctggtaaagagattcaaagaaaatcatggcagagtaagagaagcgcctcggggcttgactatttgtatttgtcttagggctaacatagatttggagtgagttggcccctatcacctcaagggtgagaattgtcaccccgttctcacctttctcacccagtctcaagtcttctcacccatatcacccgcactcaccctagagtgccgcttaggtgctgagggcacattgagtattggccgtgcagaatatgtggcttaagtacggctgagcggacgggaagccctgttttccacaccctatggtcgtatgtatcagatcgtgtttcgaggaggtttatagcgtactattgcaagggttggatgtgaggatgctaacaacaccacaatgcttgtcgctaattggagatccaatcagagtggtcgaggtcttgggcaatatggtattggtcgattaaaccggaaaattcatgcacgttgggcgatcctctgcagttcaaaatgagaaatcctcgagatactcgctagttggtacaacataattgtctgcgcgtcggcatataacagttacatatctcactcacacgatgaccacaatcctctttgttcctggtgcttggaccgctcggacgttctacgaaccatttctccaagctctcacggtcgctggctacgatgtccactacgcggggtacccctctgtagactcctcggacccgttggtcactgattgccaagccgacaccgatgctattacgactattctccagtctctcgtggaggatcagggcaaagatgttgtgctctttttgtattcctatggcggcatgcctggatccgccgcggctaccgggctagccaaagcgcagcgggctcaagagggcaaagcaggtggtgtgattggactgctgttcctgggcgctttcatcgtacccgagggtattagttgtgccggtgcccagggtggaatcctgcccccctgggtcttacacgatcaggtaagaggacctcctcgtccccactatagttatataatgcattttgctgacatgttgcagccctccgcgaatcttgctgtcgtggataaccccattaaaatcttcgctgccgatgttgatgcggtcttcgcccagtccctgaccgcaggactcagaccgcatgcgaccttagctttcaattcgccccagccccatccggcctgggcggacgaagcgttccgagggcgtttggcgttcatcgtcaccactgaggattgtgcggtgccaagggaggcgcaattcggcatgatggcctccacgcagcaggcgtggattgtcagggaagtggtgtccagtcattgcgcgccattcctgaatcggatcaacgagacggtggaacttactcgggagatcattggccaattcctataaagggaaacatactttcacttggggttaggttgctatgggcttttcgtgcaggtcaccaggctccgacaccaaatccaacaaccatgcaaactttgttgaattgcccgtctatatataccaagaaataaccgcttcacggtggacatatttccatagaaagggacattagaaataccttgagtagaaaatactgtcttcagttatcccgagttacgactacagtacgaagagagacatttaattccaaaccgtctgtacaatttatttcgtatcttcgtgcacctctaggtaatattcatttgcgaccgagactcatttctgagatgcctcttccatagccctcaaaaagcaagccttatcaataggccgcccattcttctggcttcctttccacgctcgtcgctggttgaccttccaagcagagtcactcttgtgtgcctcctttttcttttcatcaccgaggtctagcttcataatcaacagacgcaacgcccaattctctataccaccagctttctgttcggtctccataagcaggcgtagcagttcgatgtgcaattttctcaacacggccttcgtttgagagaatgccccccgagcagtgatctcctccagtatgtactgtttcatctcaggtgacagggtttctcccttttgggatcccttaaacacgcttgacaacgctgtgttggagaatcctggcgactgcattgataagatgattgggaaagatagcttcccttcgtcgagatcatcacagaagcccttgttttttgtgtactaaagcaacatgttagttaggatttgtgtttagaaacacagtgtggggatttgttacatcgtcgctttgaaggttctggtagtcatctcggatctggaaatgtcttccaagcaacgtcgcaaactgacttatatcaaggtccctaggatatattagcctgatcttattttcttgtgcgatgagcgttaaaatacctattcaccgtcgcctcggatctcatcagacgactaataagacggaataaaccaccagtctctgtgtaatggtcagtaaattggtgtataaagatggatgcgccaatacgtactgccgtcaaccatgctgatatactgcgcaggggtcggcacatgcgtatggtagctccagtggagatcgcgtccctgcccaagctgtaggttacgcatttcatctagcactgtcagttcgagaaatctcaagcaaatatgccgggataatctacctgtgtaaactaaaaccgcagacggggaaagcatctgtacgagatacaaggcttcgttcatgagatatgtcgcagtattgatggtttggccaacgccaaatatctgatgcgccactggccttccgcgtctgaggacacttccatcctggatgtcatcgagtctatttcgaggtcagtaaggaaaacaattgcaggttggaatgggcccggttacaataatgatgagttgtgtaggaagttaactgcaccctctatgatcaggagggacttcacgggcaccttgtaccatgagttcagagccgctatcattgtctgtctcacgttcttagaaggcagagagttgatgtaggtgtagggatttaacacgggctgtggatttctagttagcacttaggtctccttgtctccagcgactcttgcggatagaaacttacctcatcgattgtgggatacccagatgtgtacttggccaggacatcactctctgctgtgttgtctgaaatattgttagtctcgtttgccggattgaaaccaactgagatagcgtgttatactcacttgacttaggttcttggagttcaatctctttagtaccattaatctcttgttttgagtcacgaaggtgctcttcaggcgtgagaactcgcacagcctcgctgccaaacttctcaaggtggtctttatacggattccgttcaaccttgaagtaacgaggaacacacagactccaaacccagtttccagccattgaatgctcgagcagtttcagccagctgaggattgaatctgatggactagccgtcgccttgtactgttccttcaagtaacaaaatcgctcttcgtgggctcggatctccgcttggacaactgcctttgctgcgcagtgcgtcaggccttgtgtaactgcgacaatatgtaccgcattgactaatggcacctcgccattgcttttcacatgagcgtcgtattccttgtcccaagagaacaagtcatttaccaggcataattccgcatatgcgacgtagctcataggatcagcgattttttcttcctcgggggtgagtgtgatgcctgatccccatcggaaattataaagtgtccagcttggaataatcagattgagttctcaacttcggaatggggtgacatactctgctgctgcatcaacaattctgaactccaggtagtcatccagactgggaaattcaagactcctcacgtcctgtaccgaggcagtgaatgtttgccacgctttaaggaaaaattcgccgaacacgggatccaaacgcaggtactcggccgcaatcttggcctggacctcggatttgcgttgtgctttagctgaaaccctgttcgatacagaagtcatactgctctgattaatagcctggtgaagcattttgttttcgagcaacaactaaatcgcgcgtcagtttcttgatccgcatacatagaatgatttatcatacagcttcttgatcagcggcattatcggtttcatctaactcgatgttagttgcggcatatagagtgatttattcccacgtaccatcatgaaggaatgcatattccacagtgtaagcgacaagcgcaagtctttcgggtaggcagttaggcgcacacagtgaggtaaaattacccgcgtgtgcattgagattgccaaacttcgacccaacggcgtcaattccattgaggtctatgtggcattgtactgaaacatgatcggcaattatcgtttgtttgtgaatatatggggtaaagagagaggagtatgccggattattggcgtagatctcgggatcaatgctctccgcatacacgtcggctattgtttcgcccatgttcaatgttgctttgtgattcgagaaaataccgagctgcacgatgcacatgcaacagccgagggggcccgggtggtataaataatcgaattagaaaaagtaaaccacccttgctaagacaggtgcgctagtttagcccggcactataaacgtcctcttccgatgccggttcattcgtttctaccgtacgatatacgaagtacgcgcaagggaggctaccactttgcaccggacaagtcccacaataatcaacgtgtctagcagccaatgacaccaattggctccgccttgacacatacaacatgagtgagacaagaaccaactatgatctccactagaagtaaatctaaagcacgttttcatccgaggctcctatctcgatagaaactgagcaattgactcgcgcacaaattcgagtgacgatcatgtaccttttacgtctactcttgcctatttgagtgcgaatctaacttgttactatcaaggacagcacgccatgggggttatgccaagcgggatatccacagcgaaaggagcattgaaaatcataatctcggttgggggccgttacttttagtgcacttcgtgcaaacgggtcgcaccaataagaaacaagcacgttagtgcatcgtggagtcttttgctcgttatctgggctatttacaaccggcaggatcggagggacctttgcgaaacggccgacgccatgagccacgccttggccggcgcttgtacgctctaatttggcgagttacatggcgggaaatgtggagatggtggagatgagagtcgggaagattgaaagattcccttagtagcccagatggagtatggagcagtaaaaagtacatctgcgtctagacaagatcttcctcagggtttcctatctgagctgtcgctgcttttacgagttcccgaggtagaggagatgtcagcacgaggggtcagtcacgtgggaatgagatgcttagtgatttagactataccaagaagggattagcgtctagatatcgatttacggaggacggagtactccgtacaaaggtcatcattctgttcgatatagacaagtcaaaaggccagttcatgattcgatgaattatcaatagtaatcaaatcttcgccgagcgggagaccgacgtggattcgcccaaaaagatcaatcgatcaatggcagactcgtgctgccaagaggacttcaaggcatctttagtacctgcaagtgcttgtgagcgcacccacctagatgctatctgtgtcgcacgctcatcgccatcggatgatgcatcgtaaaggaccaaacatgaggacactatggcagcaatatgttgcaggatctccctgtcgcgccacaggagttcgtccctgttagtactctgtgtaatttcgagcagagcgtttagtcttccttccacagtaacgcattcctcggcgaaccccgattggcagcccttcaaaatatcctttgtccattcaaccaaaactgagcctgccgacttcttaccctgcaagcgtttgtcggtaagaactcgaataacatcctccgccataacactgactgtgccctcccagatggcattgacagtggtatctcggaaaatcttggcgatgttcagaataccgccatcttcattattttcgcagtacccaaccccgcccaggcattccatgcaggcccgaagtccatgaaccgcgttcacactaacagtggccttcaatgcgggtgttatcagacgcaggagagtggcagccttgacaggatcctgcgggataagtccagcagctttggtactgctgaccatggagtcccaattctgctccatggtaccctgcagtgcgaccccgaagaatgccaaatgcattgccgcagagtaattgactgtctcgtccgccatccaccgcacgtgctgcacattatcctgcaaaagcgctccacgcgtcttgcggacacgagtgtacgcccggcaaatggatagtccgcggccccaaccagctgctgatacacctgcgcagtagagtcgggtgatgttaagaacggtcgagatggcattgactcccctaccttcctctcccaccagccaaccacggacccccttcaattccaactccgctgtgggtagggacttggtgcccagcttgctcttcaaacgctggatacgaatgccgttcagctcgctcgcgtcactgttctttccggagcggcgccgcatgggtgcaaggaagaggctgagacccttctcggtctgcgcaagcagcatggccatgtcggagtcagtggcgctgctgaaccacttgaatccgtcgatgcgccacgggcccaactgcaacccatgagcatccacatctcgtccctgttcggcatctcgtgagatctcttctgccgtcaaccgccacgccagcgtctccgtttcccgaacatcactgccgcccgttctctccgtcatccattgtcctgttgtccaggcctcacagggaatatctgatacaagacgtctgtatgcttcttgcaagaccgcgcggcggccgggctgatcaccgtccacgtcgtccagccgtgccgccaacaatttagccgctccgtccgtcatcgagccaggacaccccgtcatcgcagcactgggtgaccagacatggttcattgcgaactgttgcacgcgtcgattccattgttcattgctcttcttgtaggcgactgcaaccaagccctcctcttgtgcgatggctgtcagctttctccacccttctccggtgattaacgggtcgacacgattctggatgccgaaggtactaagtggtcggatgatgggctgattcacctcggcatcggtggccaagttcaggatagccggatccagtgcacgacgcgataggttgtggactgagacgccaacaggggattcccgcggcaggtagagattgagaattctcgcaagggctatatcatccgaagcggccagggagcttgagtttgctgacccatcgttgacgaaggtatatgctggaggaaccgtggggatggactgaaagaagccatccgtagacgatgaaggttttctgccggtcgagtgtaccatcatgcttgttcaatttgtatttgcggggaaataaagttggggtatcggtttacggcttgggtgcacgctatataagcaccggatagcgtccatcagtaccgaggttccccatgtgggactcgtttttgatatcctagttccaccggatatctgacttccaccggatgtaccttgaatcctattggtgagcgaggagctctgtccccacaacttgagtataccatatctattccaccggatataacccagctggcaattccagagtcagttccacgtagaacataaagtaaatcattgtcttcatatgcatgtgcaagatatttacttccaattcctcaattcgcaaccatgtcttcttgcactatctacaaccctgtgaaggactatactatacccaatacagacctactgtccctcgtctttggtgagaattctacattaatcgagacatacagtctctaattatgaatagaccaccccgacgtactagcaaaagatgataccatcctccatgtggaaggtgcagacagcagcaacagtatcaccaagtcacaatgccgcgagtacaccatgcgaatcgcccacattctgcgcgagaagtttgcgattggcgcccaaggtccagggatcgataccgtttgttgcatctcgaccggacaagttcttctcccctcgcttttctacggcgtgattgccgcgggcggggtgtacagtgcggctagctcgagcttcacggccggagagctggcacgacaggtgaaacacggagaatctcgactcattgttactagcaaggactgcatcaaagtttccttcaaagctgccgctgaatgtggaatcccactggatagggtgttggttctagatagttcacgtggacagagaagtcttcgagatggacacgggaaggaactgctccatgagtccaccggacagctggcttgggaggtgatttctgatcaacagatcctgcatgatagggccgcctgtctgatttacagcagcggaacaactggcgagcctaagggttagttgcgtcgctccttttgtggttcataactaatcaagacccaggcgttgaaattacacatgagaatctggtgtccgctgccgtcgtgaacctctacgcctaccgcgattacatatccagacaaaaagctcaaaccccagacttcacaccagaataccggacagtcgcacacctcccggcagcgcacatcgccggctgccagggctatttcctgcaaccggtgctatgcggcggaacagtgtactggatgtccaagtttgagccgaaaagctttctctggaactgtgcgacatatcgtcccacgttcctctttaccgtcccaccaatctaccagttactggtacaaagcccattggtgaatgatcaatttaagcatatgatccatgcggtatctggtgcggcgcccatgggaccggatttggtcgtgcgagcaaccaagacactgggatgtcccgtttcacaaacttggggtcttagtgagacaactggtagtgtcaccatctctccctgggacgaattcgagtctgatggaagtctctcgcctctgcttccgaatattcggctgcgcatcgttgacgaggccgagaatgatgtcgaagacggacaggagggagagttcatcgtccaaggtccaatggttacaaaggggtattggaaaaacgaagaagccacgcgagcgagcttcacagccgatggagcatggttcaagaccggcgacttgggattgcgacgaaatgggaggatcttcatcatcgaccggaagaaggtgagcgactatacctcaagcattgaagtaatttctgacagtttcggttgcacttcaggagatgatcaagtataagggtcttcaagtcgcaccagcagagttggaaggtcttttgctatcgcattcattaattcaggatgtcgctgtcattggagttccggatgtcaacatggcgggaaatgagcttccccgtgcgtatgtggtggctaatcagagcaaaatcacggaagatgccatcaaaagcttcattaaagataatcttgcctcgcataagcaattgaggggtggtgttatcttcgtacctgagattcccaagagcccgactggcaaaatccttcgaaaggagctgcgagctgctgcgatgggagccaaggcgaagctatgaagcggagccgaggttgtatatcacgtgacctcaaatcaatagacaattcctgtctactttcagacaaccgtcagtaaatattgtactcaatagcaaatagagttgaatataacaccgtcaatcatacataccttttaccagtacgaggagtagatccttggcatcctatgacataaacatttgacttccgagctccaccggatgtcagatccctcccaatatccaacccttgtattccgctgttatggcgccctccagggtccgatctgcctgtgcaagatgccgacggcaaaaactcaaggtcttcctttcttgtcatacatcacggattctacttactctttacagtgtgatgatacccgaccctgccagctgtgcattcgctccgatgcagaatgtacggatgttataaacaagcgacgaaggtgagtaggacgcaccatagcataatatatattctaataattatagaaaaaataccagagctcagtcacaaagcagaaagccgcctgagaatcgtccactgctcacggaaacggccccttcgcacgatcccagccccggtctacagacgcatgttgggcccggtggcaatcatgctacagatctggtcaccagccagcgagagcgagcccactcaacctttcatcatgcccaggaggtaagattatgtactgtcaagcttttcttctgctgctctaaccccatcagctttttcgcaatcatatgaccaccttgcgggactctgatgccattcctgacggggcccccgcaaacaagctgcctcaagttcaaggatcgagaataccaattttcgacataattgggatgcagctcccgtcgacacccgttactctggcattattagacgcatatctccaagcgaatcactggtacctttccatgtttcatgagcccagctttcgcgcacgtctggtcaccatccttcggactgagggtattctcccctgtgagaagtcatttttattgttattgctagctgtcttaattcttggagcccggttttctaatcacgataccctacattccctggactcacagtttaatcttcagcagtgcaaggcaacgtggatcaaggctgtggaggatcatatattctggattctaaaagaagccacgctagaatcaatcgcctgtgccgttctcatgtccattgagtaccttttagaacgcaagacgcagctctcctttaccatgtcaggactgggatcgcgagcggcgcaggcgatgagccttcatgacgaggccacgtgggaaccactagatttcattgaaatacaggtgcgccgacgagtttggtggtccatctacatggtcgatgtgtgagttgagcaactatttgtacacatacgaagcaacctaacacgttccagatatatcgcacaagcgtacgggaaaccatcagtcctcccaaccgtacagttcaacgtttgcgagccaaaagatctagatgatacgatggccacctgcccggggatcggatcatacgaggtacgagaagacggcacgttcaagcctgtgacgatattctcgtacaaccgctacaaagcacagctgtactcgattgccgatccaacggcgcatagtatacgtttacctcatatcaagcgcacctatgcccgtctcctggattgggaaaagaccgtcccacgagagctcaagcttggcagcttttcggaggatcagagcatgatcgatgaccctgctcggcgtgttttttccctgcaggcactaacgctacaggtgtcttatgactacaaacacctgatattgtttcgccctttccttctcagtaggaaatacctcagtgtccgattacacgatggcccgatcgaatcgcaagatagatccgataccacgatccgtgaccaattattcacttctgccttgcgcatgtcgagcatctgtcggtggcaaaatattttatctattcttgggaacaccacctctgccgttcaactctgtttccagtgcttcacagcgggtgtggtactggcgatgctggccttatctgaactgtcctccccacgactgtctgaatgcaagcaaggactggcccgtctcattaaatctctggaagtggcaggttcgggcagtcctttatcccgacaaagtgtcgatatcctgatggaagccatgcatcttatctcggccgaggaagtcaaggagctagtctccagggcgggcaaaccagcggaagatctacgcgatgttgtatcagactcagtcacatggtcggcggacagctgcggggcgagtgatgcgcagcatgcaatgcagccagatgcagtgcatgggccaggcatatgggcggagttggacttgacgccggatgaaagcgagccggaaatactcaactccatctctctataccaatcgcttgcgtctttgttctagccaatacctgtcatataacggtaatagcatggaatgcaggcctgtgtacaacactcatcacggacagcggacttcaacgatctctacatttttagtgcggtgggtcctaccgcgaggctacatctgggcatttgcatattgatgtgtaccttgttaatttatgatatctacataacgggcaacgttcaactgtttccgaggttgaaaggcctaccaattccaagacgatctagccctggacccgtgtgtgattacgtcagccggtgcgtgctcagttctacccgctgacaaaaagcggcaagagatgagcctaaaatggaaaacggaaggttttcttaggagggcccaaaacatgcacaacctgccttagtgtatgcatctcgacgagtttgtatagaacaaaacttgtcgaattattatcgtcggcccgatgccaatccgatacgattgtgtagtatcccattggtctacgtggtcaccctcgatactaactaaacatgcccaggagcctcacaagcattttccgaatctgaattgaagctcctacaagagttgtacgctgcgatatgcaatgttccggctgtttcagagatatattaatatttttcacatggaatcctcacggcagacccctgtcaccacggatacccacatcgcggtcgcgcaagccgttcgaatccttgcacaaaagtagcgccggggcacattggcttgggatccgaacaaaattacaattctgtggctaaacttccagtggggattcggaagtatgccacgtagcaatcgttagctcttctacggagtgctccgtactcggcatccaatcccagctagagcaattggtcaacattctcaattcggatttatacaatcataatcccttgtggtaggtgaattgtctctcaaactttagccgctcaattttcagcatcgagcacatcatcgccatgctattactgtggtttggcttcttttccttcatttttggggtggtgatctatcgactatatttccatcctctcagcaagttcccggggccgaaactagctgccctaacaagtctttatgaattttattacaatgtggtcctgggtggccggtatttgtgggagatagagagaatgcatgagaaatatggtaagaacattattcgagacactggatcatatgtcaatactaaacattttcgaggtcctattgtgcgcattactccccacgagcttcatgtggcagatccaaacttctatacggaaatctatgcaggccctaccaggaggcgggacaaagacccaagacttgtgcgactggcaggccaaccaacttccatgttcgcgactgttgatcatggcctgcacagttcgcgtcgagctatcctgaacagctatttctccaaaaagtcaatcgcaggcttagaagacatgatccagggcaaggtgcaaaagcttgtcaagcggctgagcatggcctgtgatcaaggcacagttgtaaagctggatgctgcgtcttcggctctgactgcggatattatctcggagtacgcgcatggtgtgagtcttgactacttggacgatgtcaatttcaataatgaagttgcggactccatattaagtcttgcgtctgtagttcatgtgttgaagttcttccctttccttttggatctttcaaagttcatccctgataaggtgcttgagaagctttggttccatgcagccaacattttgcgactacagaaactggttcgtgctcaagccgacgtcgcactccaaaatggaggtaaagtggatggtcaagcaacaatgttcggtgctctctgtgacccatccttgcctgtgcaggaaagaacattggatcggttgcaggacgaaggcttttcgttgattggtggaggcacggagactacaacaggaacattgaagattgtcatgttccacttgctcaatgagaaggcattacttctcaagctccgcgaggagctcgagcaatacccatctagcacatgggccgaccttgaaaaactgccctacatggtgagcaatgcaatatggtatgccaaggcgagactaatcaatgaaatttgttcagagaggaacgataaatgagggacttcggctctccggcgtcataactcgccttccccggcgtgcacccgatgaagccttggtatacaagcaatggacaattccaccaaacgtaagctcatatattctccgagatgaacaacactaacgcgcctcaaagtccctgatgagcacatcgtctcattttgttcacacaaattcggacctgttccctaatccgcttgcctttgaccctgagcgctggatccgggctgaagcggccggccaacgcctggagcatatgattgtcaccttcagcaagggctctaggcaatgcatgggtaaccagtaagataaactcacttcctcctggattctcaaacttaccagtgatctagtttggctttggcagagttgtacctggtcatttccacgctggtgcggagattcgatatggatctatatggggtgacggcagataacatcgtcacgcatcgggagtatggctttggcgttccaaaagaaagaggtgaaggattaagagttagtattacacgggttcgtgacccgtagtttgtatcgtttgacatatactctttcgtatatatatcgagagtgggcttatacgcgatcatgttaacactgggcacggctcaaaaaatgatattttatacaaatttcacgaccctgcacaaaagagaaaccaaagcaacaaccaagctataatcgcacatggtcagcacataaatctcaaagtaaccggacacatccactaagccacattctactcattttttatcaattctaggaccatcttcagactatttatacattgattgcattcgcttaaagcaaacacactcacactcgaacccacgaggctagcatcaatattcactaccataccactaatctatcaaaccgcaggcatggcaggacacagggcgtctgacgagttccgcgaggaacatgctaatttctggaccctcatgcagcaaattattcatggccttagaaacaactacccatcaaaccaggacaaagtcattggctggatgggccaactcaatctccaactctcgacccttcgacgagccggagagatgatggggttgagttatccacctagcgacgtcgtcctcgatgctccacctcagtacttcactgcccgcgctcagcgccatcaaaattacttcggtaccaactttgggtactcctgctggtatacccaaggccagctaggctacgccattgcagaccttctccaccagcgagatcacacccgtgtagccgaccagttggagcagttgctggtgagttggcaattgaccgagatgagagcatttcctcgccatctcactactcacaatcatgtcgagcacccggccgatatcgtgcatattgatgttccaccatactatacaccaggcgctgggcgcagcaagacagagactgggccagtccgtgtccatattactatgcctgctccaaccgatactatttacggcgtggcacagcagactcgccatcgccctgcaccataccttgaacgaggtgctcgcccgagacatcgtgggaatgctaggctaatcccgccgatgcctaagatggacctccaactcccgaatatcatgcataatagcgatattcgccatgctccactgccgactcttcctgctgttcgttcctttttcactccatacagcattcccggacatgctctgttcggtataccaaatatgtctgtgccacccctacgtggtatgcagtacccgtctattgtgccagccccggatactggtgattcattgtctgttttgaatgcccatgtcggggagactttgaataaacacctgttctgtcgggatggcgttcgctgttgagatagtgggcaatctagctcgtttgagctttttaattggaccctgggtcaccacaatgcatgctttggtattgactaccactgagtttaagaactccggttgacttgtggttattgctaacgctgattttgattggtaggttcttatactcccttgtgctttgatcgactatggattgcgccctctcttttggaaaaaaataaaatgataatggcctgtatggaatcagaacgctttatacacacaagaaattgatgcctggaagagctagtcgccatagtcctccggggatgttcctgaataaatttcgggttatgtacttccaaagttaggagccttgagcgcaatagaatttatagcaggtattcactaaatatggatcttagtcggttaaattaaataactagagatagctttgcaacttctaccaatacgagcatattttcggtgtgaagtacaagatcgatgagcaataaacaggggttattaggctgttcagcgaatacggctttattcctgctcgtattcacatactccgtatatctgtgtagtatcgatctaaatagtaagtgacttccttggtataaagacaaggaaccttgtgcgccgtttcggttatggttagatcggtggattcctcaaccgggatctgaatggcttgtatattcttattcagacaatttgtgaatctctcaataacaaccttggtagtatacttgtctagtcaaaagtaaacagttggttaatatatgtttgtaaagtggtatgttggccagaaggattgcacctcctatacgaggtacatgtatataaccttgcaatatactatacaacatactatacatggcaccacatcagtccatcgccttccatcttgccactttccaaatgtgttgaacctcaacaagccagccaatcaggggccaggatcagtcaggccattatcatttcttggcggccgatctccgcggatattatttggaggccagcttgtccacttcagtcagcagacactgacattcttgattcttctattcttttctaatattattgagattcttttttctcttttcaagctatcactgcgtagacttcacggcttacctccaacgacagaccctcgcgttgattctctggcctttgcgccaccttgcatatacaacaaccggacgactacgtgcttgatcatacaccacagtcggagaccaagatgcggtctgcagcgaggctgctctatgcagcagtgtttgcgcttgctagcttgagccatgccgccgttcataatcctgcattggacccaactaagtgtgctgtaagtcttatcaggaccgaggataccaacacagatgactgacagtacctagatcgaaccttcggccatggtatccgatgcgtgtgtcacatacggcgagatcaacggcatgaatgacctgattttcacgacgctcaactccctcacacaagaaacggactttttctcctactatcgcctcaacctgttcaatagacaatgtcccttctggaacgacgccaatagcatgtgtggcaacattgcctgtgccgtgaacactatcgactcagaggaggatattccgctgacgtggcgcgcggaagaactcagcaaactagagggcccgaaggcgaaccacccacctcgcaatattcaagccgagcggccgaaagaacgcccgctacagggagagctgggtgaagatgtcggcgagagctgtgtggtggaatatgatgacgaatgtgaggaacgagactactgtgtccccgaggacgagggttccgccgggaaaggagactatgtgagcttggtggataatccggagcggttcacgggatactctggagaaggtgcaaaccaagtgtgggatgccatctaccgcgaaaactgcttcttgaagcccgtggctgaggagctggaggagcagtcggtcaacgttccaataggcggcctccaggcagcctctgacttccgcgacgttctccaaaaggaatcgcagcgggtagaaagcctgtcgcttgataacgagtgcttggagaagcgagtcttccaccggctgctgagcggcatgcacgcttctatctcgacccatctgtgctgggactacctcaaccaaaccaccggcctgtggcaccccaacgtgcaatgcttcaaggatcgactccttgaccacccggagcgcatctcaaacatgtacttcaactacgcactagtctcgcgcgccgtggccaaactccgtaagcacctggacgggtacacatactgcgccagcgacccagtgcaagaccgtgagaccaaaaagcgcgtcaacaagctaacagcgaccttgacggagcttcctcaaatcttcgacgagaagatcatgttccaggacgccaacgccatcggcctgaaagaagacttccgcaaccgcttccgcaacgtcagtcgccttatggactgcgtcggctgcgacaagtgccgcctctggggcaagctccaggtaaacgggtacggaaccgcgctcaaggtgttgttcgagtacgacgaaaccaagaacggcgagaacccgcccctgcgccgcaccgagctggtcgctctcatcaacacactcggccgcatctcgcacagtatcgctgcttcgcgcagtatgcagcgcgctctgctgaccggcaccacccacatgttccccgtccacggcgccgtaccctcctctcaccacgccaacgccctcggcgacaacagacgcgtgttcagcgacggcaataacaacttctatttcgaaggtgaagataacgaagatgattatgtctacggccgaggcgccgcgccagaacggtacccctgggagcgcaaaccgcctggcccagacgatggctgggtcgaggatttcatgtccgagtggaatatgatctggggtacggttgggtatatctggcagtcttggttggacatcccatttacaatgtaagttgctcttgatctggttattggatagactgactgactcttgcagttaccaaatcggcacgtcggagttcatccgactgtacaattattggctcggattgccggtgcctcctcgcatgtggaagctgaagacgccgcagccgcgtgcacatactcaacctgctgcctatgctaatcgtgacgagttatgagttctgtatttcatctttgcattggcatttgtacatatggctctgtgctatggcgttgatagactttgtctgaatggttttgtttcagtacttgaatatatactccttaatgttcaggttattttgcctcgcttcgctcaacaaactattggagttatatgttcagtgtagttttgggtgttacaaagtacatattgaagctaaaatatagagacggatgtgaataagtctgctagtgtctagatatgtataagtatgactagacgacttatatctacttcaatccttcgctcatctccatctcaaacttcggtcgcccccaggtacatgcatttgccaccgaaaagatttcttccgtacaggcggaagagcgaaccgggcaggggacaggctgagcaaacaggatggacaagagaagtctgctagttaattagacatcgctgcttattacagagccaggcattagaggatcgtccttgtgaaaattatgaagaagatctacctaggcgttgtctagttgtaggtaataccccgtgttctcggcaaaccccgacctcggcatctccaccacatgcgtcttttcttccatcttctctcatcgctcaccccccagcctcgcggcgaatccatctgaacagacgtatatcgtatctcgatgctattccgctaatatccaactccatggcgacgccttcgccaccaaaaccgtgggagcgagccggtgcagctggtaagtgtcttctcgattgccgatatcctagcgccacagagtcagcgcaatccacagtgtccacaactaacttccttcctcaggaaacgcactatcaacagcacctatcgccggtagccctgctgcctcgaccgcgatgacttctacagccaaccccgcatcgtccaccgcccccgaacttccctcccgtccgagcgctctcaactccgtagttaacaactcgccatatggagcctcacgccttggaacaggcgcgtacggatccagctacggaggcatgggcgggatgggtggcatggcttcaccttactcccgcttcggctctatgggcactatgggctccatgtacggcggtggcggctacggaggctacggaggtggcatgtacgggggcatgggcggtatggggggaatgggagggatgggagggatgtacggtggcatgccgggacaagatcctaatgatccgaacagcctgacgaactcgttcgggcagagcacacaggccactttcgtcatgattgagagtattgttggtgcgtttggtggctttgcccagatgctcgagagcacgtacatggctacgcacagttcattctttggttagttccctggaagaaatacatgatacatggacactgctgacttttttagcaatggtctcggtcgcggaacaatttggaaacctgcgaaacacactcggctcggccctgggcattttcaccctcattcggtggttccgcacattgatcgctaagctcaccgggcgtcctccgccagctgatgcgacttccttgaccccggctgcttttgcggctttcctcggcggtcacgccgctgctacactcccccgcggcnnnnnnnnnnnnnnnnnnnnnnnnnnnnnnnnnnnnnnnnnnnnnnnnnnnnnnnnnnnnnnnnnnnnnnnnnnnnnnnnnnnnnnnnnnnnnnnnnnnnnnnnnnnnnnnnnnnnnnnnnnnnnnnnnnnnnnnnnnnnnnnnnnnnnnnnnnnnnnnnnnnnnnnnnnnnnnnnnnnnnnnnnnnnnnnnnnnnggcgggcacgccgctgctacactcccggatggctcaccggttcccgccaagccatccaagaagccattcttcatgtttttgattgccctctttggcctcccttacctcatgggcaagctcatcaagaccatggcccgatcccaggaggaagaggcgaaacgtcgccagctcgtgggtgttggggccgagggcccagcatcgctcgacccggccaagctggacttctgccgtctcctctacgactacacccccgagacccaggagagcaacggcattgacctggccgtgaagaagggtgacattgttgctgttctcagcaagtcggatcctatgggcaatgcctccgagtggtggcgctgccgtgctcgcgacggccgcgtcggatatctccccggcccgtacctggagactatccagcgccgacctactcagcaggctatcacaacaggcagcgagcctgctactcccactactacgatgaggggcgaccccgcaggccgcacacagagcctgtcgtcactgagcaagcccgagctcaacaccaagatgggcgatatcacgcctgagagcttccagaagagcacgttctactcatgagctatgctagacttgcttggctttctccttggtccttgtctttgaaatagacaagttggaacagtatatgattttttatagtgacgtgaaccggccaaaaactcccctttgagctttgctcatctttatatatcccctcgcgtgccttgatcttctcgatctcttatgaccagctgtgcaggtagcaccttgctctgcctggctcagtattctccccagcgcttcccctctttgtccatttgcttcctctccttctgtcggcttgaattcgtttagcgatctctcattggctttgtatttagtacttattagtgcatgcacacacatccacgcaacctctcccactagttctagttcgaaacaaaagcccctcttcctaacaaaagtacctatcctttcccatccaacatcccataatcctcctcgtggactatcgtctggcccacagtgggccatgccattcccgtcccgtcccggcacatatccgtatccgtccccaccgacatttgacatttgacattgacatttgacagtcgatacatcgaatatcattcttgactactcaatatgtatactgccgttgcaatagatacatcgtatatcattgtcgactacccaatatatacatatgtccaaggtacaacgtacaatgtatgtagtatgtacttctggagtaaggaaggtaaggggctgaaagtcgtgtccctttaccctgcgctgattgtgggacatttgtacggagtactttgtctaaatagtgggttttaccacccacatacctgccttggagaaatattgatgtgccgtgtcgtcattatggtactttctttcgtagttgatctacggagtaaaacgaggttaaacgcttagatgggtctcgttcatcaggtttcgtttcattgcgctatactttctacgattccttctgtccggttgtgtcacgtcgcgaagtatgtacgtttacgtggatgtgtatatgatcgccggtgatctgcgtgtcagggctatgtacttagccactatgtataatcgaatagaagtgtaggatgagtcaaacgtagtgtagtgtcgatcgatatgttatgcatgggaatcccagaaaatatatgaggcgtggagtacggagtacacagatgacagtgtccggatggagcgagtatgatggagcgaatgtgccggggttggtcggggtaataggcacagggcggggttgagtcgtaaaatgaaaatgaaaatgaaatgccgagcagattcagattcgggttgcagtatcttccagggttgtgtctgagaaaagaaatatcatgtcgggtgagacatgacgagactgactgggacagggacagggactgagccggggtgttcagtgtcagttgataagaacagggacaatatcggtcgagcggatggagtatcgttgtggagctgatgcccctttcgtgctacccatacttgagaagcaggacagatatgcgagatatgttggatacagaaaatcagatgccatgcatagaatagatcatcaatctagaacgcgaatacccatatccatatccatatccataataagaacgcccgtgctatgagtcttcctccgttggctaagtttggaagggagatgggggtcgggacggagcatgggaaccatatacatcgacaaaggccaaagagacaagaaaacgggctcacacgctgatgggaatggggaaatcaagaaaaaagaaaacaagatggagataatgaggcaaagagaaatgaaaagaaatgaaaagatctcaatcaaccaaaaccgaaccacaacaaaattaactaatcacatccccaatccctcatggtgaggaggctcgtggttagggtcatgatccctagcccacttcgacatcgactgcgtaagcgtaaagtccaaatcctgcaaccgcgtctggaacgactcgaccgtattccagtcaggcggatgagtatcagcttcaccaggcgcatcctcgagatcccgaggcgcaggaccaggacgagcatgcgggtgcgaggtgtgcgtgtgcgcattgtgcacgctgtgggatctgtgtccgctgtgcgcgctctgcccatgcgagctgtgtacagcatgagcggggagcgggctgtgcccatgggggctatgcacatggaccggatgcgggctgtgagcgccgtgcgagtgagaccctgccccgtgcgcgagatggttgcctattgactggtggtaggactggatctggcggggctggtttgggtgcatggacagcggcatggtcgggctttcttccagttccagatcggggaggctttcaaggtggtttgggtctagagcgagatatctgccatcaatatcatgcggtacactcacactcaccggaacggctgtggatttaccgtatgagccgagtgggtaggagggcatttctcgggttggggattgcatgtcggggggtgagatgggggttgtggcgctgtgttcgtctgttggctctggggtgtagcaggtcatgtcggagggggtttctatgggattattagtatgtatgtttggtttgataccgtctagttcatatccatgatgattcactcacgaggctcggggcttgactcggccttttggtccttgccgcggttggtatcccacgttgttccatagcgacgcacgaagcgggcgatgcgcttgggatcgacgttctggccgtttacgcggaaggccgtctgtttgccttgggcggcgcgcttctgttgcttgcgaagcatcagatggacttctttggctttgatgttctttcgaacgtgccatgcggccagacgatctttgtattgtttttctctagagcgagttagatctattcagacgaaggtagaagagaagggtgtattacgatgcaaagaacttataatctctctccataatccgtttcacatcgcgcagtttcaactggtcgttgcggtagagttgctcgatgatttcacgatattcatgccagtcatcggaccggcggggccgaaagacgtttggcgactgaggggagatgggggttgcgtaattattttccatggtgagggtgaggtataggtataggtaggtctagatgaagatgcgaggtcgggttataatataactggaatgcaaatcatgtaataaatgcaaaacaaaatagcccccgtccccctagaaatccgtaaaatccgtaaaatcccaatccgcaaatcgccaaacccccaaatggcccgaaagagcaaagaggaaagagatcaaagccaacgagttctctttggggcgacgtgcacgcggacgcacgatcccctggttccccgggccaatcacatcccagcacttcagacccacacccagctatgacccagctatgaccagccatgtccgcggccgcaacttgggggagaatatctccgggttttggtcttgatgaggtaggagtcttctttgttttgttgattgaattaatggatttgagaggtatttcaatttatttattccatgtatcgcgaattaatatcaaaccaggatgactcgatcacaccgttagctggagacctcgagtggagctgtactttggcctttacgcctaagcgaactattacatgcagtgcactggccgcaaatggatgcattttccgttgcctttttcgttttttcatttcttttacggagccctcggtatggagtacgcagataatacgccgccgagagtccccatctacccctattactgcggtataatacccaatacaaagattacctgcagatccaaaacaccgccgggagcgggccgaatcttccctgacaggtctttgtcttccccgagtctaaaatcctaaaatcccaggggcgtggatcaatcagccacagaatgggagtaatatcgtgtatagtatagtatactatactatagtaaaatacaataataatatatctcaatatgactataactacggagtataaggtgccaatctcaacggaggaaaccgttaaacccgttgacatccaccgcaagaggggaactcactgcgctttgggctctggacaaggttaccctgtccgaccaatctcccaacggtgctgtatatgtatgtatttataggctaaactgttaattataaaccttcgcggccgagactgttatgaaaaacgtacgatgcaaggtccgtgctactgccctttttatttatttattatgatatagtaaaatatgataatatattatttacggaatactccgtactccgtacttcctcccgacagaagtacagaactctgatctatagaatatagtttagatgctggatccctccgttgaacacgtagtacgagcttagcaggggtcactggtaattcaatcctacgctcatctacaacggtgcactgcacttgccccgctatcacctgcacgcgtggcccatatcccaagggctagaatcagcatctcccagggactagtgtcagctgggatcattctgggcgatgggtgctgcactgatctacagggtttcgtttctgggctttcggggagctggaatactagtccccgagagggatagggatgaaagggatctttgctttgagcttggattcttgaatacaacgtggctagttgggtacctcctgacaatccgattccataggggataggggagaacaatgaattgacgatacgccgcgaagcaaaaagaaaagaaaagaaatggaactcctcccgcattgggcctccaagctattcgctagcccccaaatggacatgatcgttcttaaagtgcggggtgtactttggtctctcctataaacaagataaacaatataaaggcatacaagatacatacaacatactaaactcagcacagattaaaaacaaccgcgctttcctgaggggaacacaacggccatcccgcgtggagcccctccactccgagccgcctgtatccggagatatctgccgcggccacgctcataggtccacggaccaccgttcaccggctcggatcgcatgcaggtactaggatgtacggcgcagactggaagggcactgcatgtcggacgcagctcgctcatccgcagacgagacggggaagggattgagaggagtgggggttctcttggcccacgcgctggtaacatcggtcagggggggattggttgggccgagtccagtagtttgtgacaggccaatgaaacggtggggacaggcgttggttgaaacacccagtggcacgtcatggccatcccctataatgtacatgcatagacaaagtacgagagtgatgcgctgggcagtctttaatttcatcctctgcgcgatttttgatttgatttcgatttcgatttcgatttcgatttgattttcgattttcgattttcggtttcccgcattgacatctgatccttgcttttggaaagtttcatgtgttcatggtttattcttggtctgtcgggcttgatccgcggctgcaacggctgcagccgcgacggctgctgagttggaccccgtgctagccagattgctggcatgcgcaaggaggaacttgcagcaagtcagcgtgtacttgcaggctcgagtccacgtctcgtcattctggttgaagcccaacttgatgctggcatctccaatccgatcccgcttgatctcatagggcagctttaatcccggtgcggtggcgccggtctggccgcgccggggagatacaaccggtgcaggggtcttttccacaaacttccccagctgccgcagacactcaaggaacgccaccatgcccgagtcaaagcgacggtgaagccaaggaaggttgagcgggagatcgcccgacgagaacaggtctaattgggtcaccttgggtgcagcgccctcgaccggctggccggctggctgcgtgggatattcaatcttgtcaatccgcgagttggaccccagcggcttgagccgatacccctgaaattggaaccccagcttctcggccatcgtggccagaaggagggcggtttgtccccatgcagcgttgatttcaggccagtcaaccgaaggattggccagccggcccagccgtagtccattgatagtaccgaaatatccatcatgaccaatgcagaacgcgtcattgtagacattcgtccgttgcagtcgctccagctgctgggagtcatgatcataccgcatattgagcgcatcccgttcgttttgaaactcggttagcgtcaacgcaaacgcattgcgcgaccgccagaagctctcctcgtccgcatccaggcggcgcgattcgatttccaagctggcaatctcggcatctagagcagccttttctttctcaaaggcctgcagctcagcgaaggcggctcgttccgcgtcgaggctttcattcaatgatttctgtgccgcctgcacctcctcctcggtcgggatcgacgcgttcaggttcctgagaaaggagatgtaggcgtctcgctccttcgtagaccccgccaagcgtttttgtaatccttccacaagcagctcggtgcattccacgcaaataggatggtcgatatcggagcgcgccgagacgatctcaaacagccgtgtcgttttctccacctgatcaacgagcggcccatcctggtcatgcagctgggcctgtgtatttcgcttgcttccactctcactgaccggtggtggcgcaacttgggactccgtgagcatcacgaatgacatattgccgctatccgcccggggtactgggttgggctggcctgcccgcggcgcagggatagaccgtctgtaaaccggcgacgtagcatgtttagaggactgatcgtacttatcgcggcgttcgtgcggatatgacgatcgcgctgacgaggagacagctccggtatccgacaacgtcttgcctgtagagtctagaccgattagcgggatcaacgatcgcctgtgggatgaacttactagatagcaagtcaaaggcagctgggttgagtgactctaccgagccatccagcttcaacggcgtgcgacacttctggcaatacatggtggttgttgttcatttcggtgtggggagtgaagtcgggggagctcaaggagcttcggcgaacgtcatttgttcctttgcatatttgctcgcgcttgcgcctgcacaccacattctactctactatcaacagatgccaatttgattatgtgttattttactacgcgttcaatgttcgatcacttctaatgcatctatcgatccttctccgaccatgaacccggacagcatggacgaccactccatgcaggacgatatggaacgaccagcgaagagaccatgtttatcatataccccaaccgaggacgacgaggttcccgcggaattcgatctcccagctgcacgcgcacagaatgactcgcgactgaagtctctcttcgaacacattttcgcgaaatatagcaaggacttcacggacgtcggtgatgagattgacctgcagaccggggatatagtggtagacaatggacatctcctgggtatgcggagcgagcacgacgccggccagccgcgatcatggctctcccagggtgatctagaggacccagatgcagacgacgacaccgcgaagggagaggaggatgaattcttctctatggcatcttctcctggtcgttcctcggctccacgcgaagaatcgccatcgaaacagctacagacagacatggacacctctttagacttcgtgtttacatttaaatcatctgggactgcagggcacagtcctacgaccaaggaagaacaagcctcccatccgaccaaccctagcctaccttccaaaccacaagattcaatctgggcagtcccagatctacctgcatccttttcaacccccaccaccgaaacccgcaaaacaaacgcgggcttctcttcacctgccactgccacagccagatccccgtccccgccagggagcggctcaatctgggctgtgcgtagaccccgcaagccacgcacagaaacgaaacccaaggccacgcccagcaagcgtcagccagccgcgaagcgcaagtatcattccagccctgtcacgcgcgactggtcttttgcggaagtgccagatgggaatgagtccgatgacccgttgcaggactatgagccgtcgccgacgccatcgagggttaaaatcattcgtggaaagcgtcgcgttccgactaaggttaatgatggtccttctactccttccaagcggccgactgttgttattgaagttgagcggggtgatcgccaagagggggggtgtggattaagtggccatgcggctgaggtggctgacgcacatcttgaagaacggggctacgaactaagtggtggcgatgaagttcctgatacacatcttgaagaagggggctgtgaatcgagcaatcaggtagatgaagtacggcaatcgatcaatgtatcggaagcacgaaaaagcccgcgaaggtccgatcacatgtccgaccatcaagagagatcggtggctgctacgtggatgaaagctcatttacacgaacaatggaaccaatcgagattcgtcagagaatatcgcgctacttttggtcgaagccgaacttatataaccctgaagagatggatggacgagaaagagaactctcaagcgaagagatgtattgtcataccgaaagttccggttacatgtctgcatgagacgttatcgaatgatagttcttcgtcgccaaccctgggtctttcgaatggtaagctctgtgtgccatcaacctttcggaatgggccccccgaggagtccaaacgtcgctgggacgtagcccctattaagatagaaagtggtctttctagcttgcctgaagcatgccctgaagaagaggaaccgagcattcaggtagacgaggtgcctgaagtacgccccgaagaagagtgctgcgaaccgagccaccaagaagacgaagtgcctgaagaacaactacgagactacgaaccaaatgatgaagaaaacgaagtcaccgaagaacagctgcaaggaggctgtgaacaaaatgaccaaaacgaaacatctggatcagaatataaaaacgaactgccatgtaatcctatggtacacgattccacccccaagacgacagccagcatggcttcatccccgcagcccgaaaacaccccaagcaaaaggcagcccatcacacccgacgaagcaaagttgatcgtgtgcatgatgcacaaacaagaaaagaaagccagcgacgtaatgcatatgttgccaggtcgcgaatacccgacagtctggcactggttctacaatcactggacccggcgtcttgccaatccgcctcccctttccgctgcctggtcgcagcctgagctggtatccctgtcccgactcagcacccaatcgggtcttacctggggtcagatacaaagtcgcttcaaggggcgatcccgacacgaggttgagtttgagctgctacgtgcttttgtgggtgagggatttccctctgccatggtatggaacatggaggaacaggtggagccggaagagctgccggcagagctgcagccggaagaaatgcaagacgagataaataatgagccgggatctgaagcggccatgcagcaagccccagatgaggtaggaggtagtaatgctgcatgcgaagacattgcccaggaagagcttaagcagcttggcatccaagaagtgaccaacgccaccgacagtaagacgccacacaacttcttgggtattgttatagatttctgactatagcgatagtgcaaccggattataccaatacggccagtgattgacaatcgacaatctatccacacgtattcataacatgactaccataccattcaatctatatctaatgaaagtcttcgtcctgtgcattcataacatcctcaagcttcgtatcaaccgccccaccaacatcaccagccttggcccagaatttagacagatgccgtgaaccagagtccgaaaggaccgtgacaatccgatgacctgggccaagcctcctcgctgtcttgacagcggcaacacctataaagcaccataagtaaaacacatgtgcgctaggcaaagagggattcaacccacaattcactgcactgctgctcccaataaagatcccatccttctccacaagccaccgcgccatagccaaagcctgtgcatcagtaacccgcaccgcatcatcaatcatctccttccccgcctcgaagttcgccgtgacccggttaatgccaataccttcaacgatagtatcaacctgcggacgccgccgcgtcccctcccgctccttaacatcaaacataacaccgtagaccactcggttgaaaagcccacttccctgcgggtcagccagcacaacattaaggctaggcagcaagggctttaaaaacctggccacgccagaaatagtgccgcctgttccggcgcccgctacaaacgcatcgagccggccaccgcactgagcgtacagctctgggccggtcccttcgtagtgggcgcgccagttagcctcgttctcgaattgatcggcgaaaaagccacggccacgggtcatgggctcgtgtcccgcggggggatcggattgcccttccgctgatgcagatgatgcagagggggttcccgatgaggccgtgtgcgtctttgctagtgctcgtgcgcgattgacaaagttgtctttctccactattggcgctggcggaacccgatccacgattgccccgagtttcagcagcaggtcggatttttcaattgcctggtcggacggcaggcagctgggttgcattggcgttagtgttttttgctattggtgtgatgccagggtggcgcatacgtacatgtgtgctaggtagccttttgcccgggctagtgttgctagggaaatgccggtcgatcccgatgtgccttcgtagattgtgtcgcctgaatggggtgtcagaagaccttgttcttcggcctggttgaggtcagcgatgctggtctagtgcaggaaactttttggtttttgcgtattttagcatacaatctcgatcatgcttagtgccactcggtcttttgagctctggccagcgccattcaggaactgcggcactgttagcgcattcttagctcttttttggggtggttggtatactaagtactagtcacatacctctgccttgcccagaatctcacatcccgtctcatctgatagggacttgatccggaataggggggtgtttccgatacaaccttcaatgccttccacaatagagggcgggccagctcgggtgccatttttgggggaggttagttctggctcattatcctcatgtctgggacgtgacagttcttgatatgcgagtgccaagcagacaccggtcacgaaggccgtgcctatatacgccgttgaatgatctggcatcttcccatgccgttatgtcttgatagaggttatgtgcataggatatgaagctcggaccgtcaggctttttggtggacgacaggagtcagcttatattccgtacttcgatgaaagaaatattgaaagctaattcaaagagttctttgtattcaaattgcattcagttcgaatattgtaatgtccaaagtctcgaaaattgaaggtgatgggtttcgcctgaggcacgtggctccggtcatccagaagccgttctttccgttccccggaacaaccgtgagcttagctctacagtcacaatggactcgccagtccttacccagctgttccgacagctcttccgtcatccagcatgtcgatctataaggcggtcaccttctgtacttgctcgaccacagtctcgatcatttcttacgcgacgcacccctgtcaacgtgaagcgcaaaccgcacgaagaaatccagctatggacaaagcggggagactaccccaagaacatcgatgaggagtacaggaagtacccgacagttacagcgaaggagctacgcaaccgccgcgaacggccgcggcaggtcaaaatgctgacacgcgagttcatcgacggtgagttcgacagctcggtgaagcgtgactagttctgatatagccgtagacagcctctacaacccacattatggatacttttccaaacacgccaccattttcagccccggagagccattcgacttcaacaacatcgaagacgggcccgcgttccacaaactcctcggccaacggtacaccgagttcgaagacaagcttgatgcaacgaaaccagatatcgcgcggcagctgtggcacacaccgaccgagctcttccgaccatactatggcgagacgattgcgcggtatttggtgtcgaactacaagctgaccctatacccgtaccacgacctgatcatctacgaaatgggcgcgggaaacggcacaatgatgttgaacattttggatttcatccgcgacaccgattacgaggtgtatcagcgcaccaagttcaagatcattgagatctcgcccgcgctggcagatctgcagtacaagaatttgaccgacaagctcactgccaaaggacaccgggacaaggtccagattataaaccggtcaatcttcgactgggacacatacgtccattccccgtgtttcttcctcgccctggaggtgttcgataatttcgcccacgacaccatccgctacaagctcggcacggaaatgccacagcagggtggtgtgctgatcgatgccgacggcgagttccatgaatattacaacaaccagctcgacccagtcgcagctcgtttcctgcgcgtgcgccaagccgccgcccgtcgtcctttcccgagtcccttgggcccaccacttctccgcggactccgctccgccgcgcccttccacaaggaatactccctgccggagtacattcccacccgactgatgcagttcttcgatgtcctgaaccagtacttcccagcccaccgtctcgtctctagtgacttcaattccttgccagatgccgtgcccggggtcaacgcgccggtcgtgcagactcgatatcagcggcagacagtgccggtgtcgactccttttgtatgtggatgtttctaatgtgactttgaatttggctgactttttgcaggtccatcaaggctactttgatatcttcttcccgacggactttaatgtcgtcgaggatatgtaccgtgctattacgggaaagctgacgcaggtcacgagccatgaggagttcgtgcaccgctgggcttacattgaggatacggagacgcggaatggggagaatccgctgctgagctggtataagaatgctagcatgttgatgactgtgtagatatggacgatgtcaatatcattcaaccatgccttgggcttcgattatagcagctccttctctgcgggagtgtaatttgcctcaacagcggtttaaccctcaactcaatgcctcggtggaagtcattgcacatcctcaccataaaggataatcccgatgacgctcggggccatcacacacccagattgtgatatatgggagtctccgttaggctctagatgtcgtggcaaaggccgcccactggagttgtcaccatcaaatgtttctctgccaggtaatcgagagagattttgagacgcttcagaatcgaggcgacaatgaaaatgaatccaggctcaagagacaccaatttccagtttgacaatcccaacccaaaattagaaatatccagctctccgaagtgatagcgctgtacttcccaacaaaccccaaaaacacaagagcaaacaccagcctacctcctaattctgcggaatccgaaagacaccattagcaaggtccgtaagaaccccaaccccaaactccttaagcgcatcaagtatctgctcaacagtagtctgcgccagcccccccttatccctcgagtaaatatcaacgcccgcaggcgtgaagagcgtcttagcaaaatacgtaacaacccactcgttcccatcatcgccatgcccgaagccgagaacctcccagtgcgagctcgcgatcaccagccagcctttgccgcgccagtcccaggcgccgggaacacctggcgtcggggtgtcgatgccatggacggattttattttctcggagtcgatggattggtattggactaggtcgtcgatcttttggactccggttgaggagggggggaggagtgtgtaggttatgttgacgttgcgcttgtttttccatagcgggaggctggagtgggttacgtgccatgttccgattatgaagtcggttggtggggggttcttggttcctgagctggaatatattgatgggaggctgagggagattggagacatgtttttttgggcgcgtgttgagtctatggaggtgtctggggtgagagctctggtggcgtatattggacgatccctacctgaaggggtgttatcgtcgatctatgcaaccctaactcgcgatgaaagagatattgtcgaagtagctgggatcactgagcaagaaaatagcgcaagttaccaagttgaggggcactaaatcagtatttgaactgatgatactgatagatgctacgaaagtatactttcgtttgcttcaaacaaataaatctttacataactcaagagaggatagtaatcaaacattaattcattcaagccggctcagagcaggagagtggcgatacaaaaggatacacatacatatcatttctccctgacacaagcagcatttcacctaaggccaggtaatctcctaagttattctacatgaaggtctgagcaaatgcggtctgaccaaagacaggctgagaaaaagccaaaccaccgaagagtggctgggcaaaggagagcttctcagtaggacgaaaatggggaatattcggttttggtcctttcggaattcgttgaaccctctccatcaatgaggtatctggaggaagaggaggatcctttggttccggtgcgagaatattcgttgtgatgttcacgttgttgattgaaattcgcgagtgcgtagaaatgcctgccttgcgattgagcccactaagggctttatctagctcgtagagaatagcagcgttcagggaggctggtgtgcaacctgctgcagggtttatcacaggcacggtgatgttgaagttctcgagtgttgtgcgtgagccacgataccgtcttcgccagatgtgctcagggacgaatagtcggcagtggcgccaggagtggccgatctctgcacacttcctgcagaacgcggtgcatgccccaatatgatttctatcgcaactgtcgcagcgagagcgataggtctcctggtaggatctctctctgccgtcttgacagaagtgtgggcgcttgtaccgtgggtagtcgtattggtcttcagcttcatcaactctggcacgcttattcgtagtcctgaatatttccttattagcggagaccttggatgagactctagatgcactctacacacgtatattccattttgacgcgcgtggagagagaaacagaaaaacaaaacaaaagaggagaaggtcgggggttttgtttacttgaacgaacgaggaaggaacgactctgtcacatgctgaaggcaaggcaggctctgattcttcgtgggaaagagcgagtgacgagactgatatgaaagaactcatcgggcaactgcggtcccagtctataatgtctgcaatataatgagcaaactcttctataagtgatactctcagcttatttatctgactatcaagaatcaagaaacttctatgtctaaagttgaattgcaagtgtgagaggcttaattcatttaactatggcatgtttggatcattggatttttcatagaggaacaaaccccccggcatcaattgcgctgcgctataatctccgattgtcctgacacacaagcatcaatgaacttttgtggaagcaacccgagtcgtggatccttccctgcaactgacagtagccttgctgctacatctaggtatgaagagctgaacgtaatccagagagacatttcgggctcagaatcttccgatgggcgggggtaatatggatcgttctcgaaaaaagcatccacgagatgagctatcaagtcatccggcctttccagtccctttcgttcctcccatatattgcacaaattgaagtcgagaacccatacacaagtggctcggcgttgaagcttgtcacgtctcatgctttccaggtctgagtgaggggccatctccatgatattttctgcgctgagtcccaacgaacgagagacatcctgggtgtatgtctctccttcgctccccagcacaaattcaacatcgtagcaatccacgtttgctgagcagtgcatgatcgctaaagcttggccaatagctctagcataatgctggatgggtagatccagctcgatcatctgatcgaggcacaagttgaagtttctcaatgtaaaattgcgtgatggcgggtcattcgcaccacgccgacgaccaagatagatacgggcgagacaatcacggttagtgtcttgagatgccacggccagcttcgaggaagctgggcaataggtatcgatgagagcttgtcgagcaagcttaggcagtggaagtattcgttctgtgatcaatgccattgccggtagagggaaagagaggtgtgatccaaacaggttgatatgggagtcccaccacttatcgtttgtctttgggacgtatgaaaaaatgttgggaacccgtacttcgacggactggtttgtgaacgcctggtataccgcgagatgggcttggaaatctgtccaaagggcattttcgaatgatggacgggcgatttttatcgcataggcatgcccaggccgctcgaagataattccacattggccaaagccgatgctgcgataaccaatagaggctgtgtgctgttcggtgttgggtaatgcggatggggacgtagaaatgacggaactcgataaaacccggcttaagacttcacgcggctcggtggaaagaagatgcaacgctgaagcaagctcttcatttcgcgcagcatcaagtaaggcggataagctgttggtaagctcgatgctcacttgattgtgtcgatccatgtcagagagaagtgaagttgaatgctgaaatgacgggaccggtagattatctttgaggtctttttgatggtctttttaagagtcctttaggagtcctttaggagtccttttagataggtcgagtctgaatatgatcaacttcaagcacagggtgtggtgagaaggagacaatgtgtaaaacggggtgagctaggcagccagctaaactacggcttatgtacaaaagatatagttcaagtcaggtcaatagaaactatttactttgatctgttcgggatatccaatatctatttagtgaaatggcaagggtgaccaagctgagtatggccgtgtatatgtagaagccagactgttttcgtgtattttctacaaacaaacagagacttatatagatgaagcctatcaaacaggacaaatatggcaggccattcacctactcattctctcttcctctccctcttcctcttcctcctcaccttgtctttctgtgcctagctctaaagaaacgagatctttcttccttctggttgcaaaatagctgtatattgccctacgaatgagtgcaacttcaaataacccatacgtgggctgataacccaaaggagttgcataatcaactcaaaagaccgttattatatgattagcattggaaataacaacgactacagtattggaaattctattaaactccaagaaactgtggctagatgttcaaattgacaaggcgcacttgtccccgccacacgggcagacaaactatagggcattttcaaaggaagcaatgcgttcatgaaacatatatatgaggaaatgctttttcctccatggcttggagatcccatcccagcagccatcaatgataaaaagtagatacaatgcagccaggccttgtcagccagaataaaaacatatcccataccttcatatacgcaacgaccatatcacaatcaacaatagcctagaattcaaactccttgcggaagatgttaacgtccatgccggcgacaacctggtcagccaagtcacggcggcccatctgactgaacacacgacgcagagtgtcgtatagattcgtgctctgattctggctgatgtgcaacatgcgctcgaggcgctcgtcgtccaggccatctggatgcacaccgtcgctgatgatctcacgtgctcgctcgcggccctcctgctctacaacgcggtgcatggatagtgcgcctagcaggtgctgtgcggcttctgggtagcagccgatgttgatgcaggatacgcctaggttgtagcgggcgcgcacaaaattgggattaatgttgagggcttgctcgtaggcttcgatggcttcttccgagcgcccggagttggcgagggtcgcgccgagtcggttccagaggaggtggagctgctcttgttggttggtgctgccggactcggtggaggctagggcggcggagaaacagtcgacggccttctcgtattcctcggcgcagtagaacagaacgcccagtccgacttgtacgtcggggtccatctgggctcctgagggggagagctgggccgcttggatgaatagttctgttacgcggtcgtggaggagttgacggtctgtgaagccgaggtctgaatcgccggatacttccttcgggtcgatgatagtggggtacttgtgggacagccaacgctcgagtgtgcggtaggcggttgagtcgtagccctcatttgtatacgagacagccaagcccatcaaggcatctaaattcccggggtcgacctttagcgcttgttccaatgcacgaatagcgggcaactccttttcgttctgcgcctgcgcagagcccagcatcgtccacgcttgcacgtgctgtggatccttctgaaccgctgcctcaaaagccagcgctgccagcgacagattaccgccgtcacgcataattttcattccctcctcgaacggattgccgacagcctggtagacattatcctcctcgaacatatagtcgccgagctggggatctcggaaacgagagttgagactatcaaagccatcccagtcaccgaggtcaccaacatgcacgttatcggtgacttcaaagttatcttcctcggcaagttttctgctcgtggtctcagcctggacccgttgccatacagactcaaaaacgtcattgaagggcactgacctgtccaaatcattcagttccgcctccatcgccgcattagcctcttcgtccgtccgggtctcatttccaaccgtcgcagtctccatttcagcaaactgtgcctcccagttttcatcgtcgagctccaccatccgccccttccccttatcctgtgtctgcccctccataggcccctgttgcatgcccatctgcccacccatcataggctgcatcatccccataccgcccatacccataccacccatataaccaccgcccatcgccatcggccgctgataccccgccatcataggcgatgcgttcgcggcagcaggactggaggtctgcggcatgcccatacggctctgctgttggaatcgtgcaaactcggcaggactaaaccccgatccgttcttcatctggcccgggaacgcggcttccatgcgcgcttgctcgcccgagtcaaactcccctgcccatcctggcgaccctgtgcgggccgggcctgtttggaacttatccagctcgcggcgcttgtgctccattgcgaacggctgcggtgagggtccgtttagttgttgtcctggttgttgcatgaaatcgtccatcatctgataaggaggttcccaactccgagattaattttccgttgctgattcctttgcgaggggctgtgtggctcacctgatcctgtccgcccatcatactatgtgagcgcatgccttcttgcatgcctggtccccggcctaccagtcggtcgcgctgtagtgatttatcatcctggacgtgcttcgtgaattgtgagagcgggttccccgcagtagagcactctgggccaccgaggaacgacatggtgggtatgtggcggtttaagacgaggtagtattaatggaaattaggaagagaagcgaggacaatgtaaaggtcgaggtgcattcccccggatatcgttcgacgtggggctcaagggctttccgcctcgtcagccgaggttccccgacggcagtttgagagtcacgagatacacgaggtaccaggtacatacaacagttgcatatgaaaatttgcagaatataccaggatgcgactttgggcttattcgataccattcatcgttgtcgacagaggttaactggtgcgccaaggcgtcagatatgcaagtttgcagatacagctctcgtctccggatctttgccacctgtcacttgtcctaattattgaacatcatggtgttttcaaacgataagatctaatttgcaagttatatacacacgaatccatcacatagtaaaacccgaagaaaaggctagctagggcgtcgtaattgatgcctttggccgtaggatccaaaatacagcccttatagatccctaagcctgaacaacagtattcaaaccgaccagaatattgtacgaagtatattactataggtgatattaaggctttgcggaaagatttagtactaaaaactagatcctagatctatacattgaagagggcagcagaggcaccgacagccctgcctgcgatacaggtgagagcaaagtcgtcactgggagtagtaggacgccagagaggagaataccattggatgactactaagaagagaagaaggtggaaggtgtctgcgttgcggtctctgtctcagggacgataccatgtacccttggtatggtctacctagtaaaaggtacattttcccgaacctctgtaattctgtaagaagggtaaggatgttgaattcagtgtagattcatcccttacatagtaggcttagaagtagacagagggcatttacctagaaattatgcaaaattctaggcagcacttggaattttcacgctaagataggaaccctcagttccctgaggttcttcccgctgacatccatccttcaacactgaccatgtcgagcagcacacaatcagacaaccccggcgagaccatacgtctggccgtggagcgatttcgcatcaaaatggagtccgcggatcggcaattcattcaagaccgcgtcgatgagatcgaaactatgcatctctcgaccgatgaaaagaaactgagtcatatgcgtcgctactagtacgacttaggaacgacaagctcaagtgagagctgggatggtaacgctccccttggccctgttcagcaacatcgcgaggaggcaaaggtctcgcggctagaggacctgaagaccacatttcatcagtatatggatgggatcgttccatcaactatggcgccagatgaatggcgcgaaatgtttatgaagactttcgaaagcgtgtctaatgaggctcctcggcatgatgacaacgatgatgaggacttttatattctgagaagtgatgaactggctcacttcatcaaatatgccaatggtgtgcacgatccggactctcgtcactcgggcatctctccgtgggagcccgtgcctccaatgagaatggaaattcgcgagtatgcatatacggatcgtccggctgttcaagcactaactcctcctgacatcgcgaaagcacgagaagaattgaaggagtctcttgaagacaggctgctagacgaaaactggatttggggccattgcggctacgaattcgaggtaaaggtcggtttccatactggcctcggctcgtgtatagaacacgatgcatggtatagcatctatatgtattgtcgtcaatttgaagaagactctgatccaagtcacaagtactggacatggcgggttgtcatttttagcgctgatattatgaatccaaccgagccgatatatattctagatgtccaaaacaagatgataatctagctattgccataagctcttctaatagtttcatgtcgacaaagacataaagatcttctcctctggaaaccaggagaagcatcttctgcaagatgagcaaatagagagagtgccaaactgagcctctgcaggtcagataaagaagctgccaacacaacataaagcctacaagaggcgcaaggatactgccaaagagatttctagttcctgcccagctggcggtgatgtgttgtgccgagttcagcgaatgtctcatcagtcgaagttgatcgtcggctggagaccaggcaatcaaaagatgctctcgtgaactgcgacagcaatcgtcaagtgtattccatgggatttgatatgacacttagttacggcaatagtacgtgtagatatgatcattctacggagtacttaataaatatcgcgagttaagaatgcttccgatttccattttgggacactattgtacatttgtataattcacatataaccctctctattgcttcttctcggtctcggtctgttcagttacctgctcagttacctgctcagttacctgctcagtcacctgttcagttacctgctcggttaccggctcagtctccttgatctcagtaacttccgcaacctccttcactccgcgcactttccgatctctcatacccgagaccgactcgatattagtctgagcatccgagtgttgcttgagggagttcttcttattctgctgcctcttctcctggttacgcttgtgctcctcaggactcaagaccttgcgcttagcaaagctgacagtcagcttgcggccgtaaggcgccttgcgggagagaacctccttagcgtgagaagcgctggcctgatcggcaaagtcgatgtgtccaaatccacggggcaagccagtgcgacggtcgatggggatacggacatcagtgacaccggggatatcgtcgaacatatcctgcagatcctggtcggtcaattcgtagggaacgttgccgatgtagagggtcctagtgggcttggtttcggccatggatctgtacgtcgtgttggagaattgcaccaccacctcgcgaccttccaggatgcctccgtgctgctgcgtgattgcttgcgtggcttcctcgatggtgctgaaggtaacgtagccgaatctgtaagggagaatgggtcagtctctagtaggctttcggttgcatcggtcttgggaactcaccctttgctcagcccgcggacatcgtgcacgatcagtgcattctctacggcgccgaatttctcgaaatgcttgcgcaagtcctccgcggtcacgtcgaagaagaggttgccgacgtacacggtggtcttcggtacagggccctcgctcaaatactcacgtcggcgttcttctttgggcacacggacttggccgggcgtggatggctccggtttgacagtcgagatatacctaatcggaatccgtgaacggccttcatcggtcgagtttaaccgtgtctgtgtgagggttgggtaggcgaaccgagcggcgagaatcggagtggagcatgttgaacgcaacactgcactgctgattgatgagcgtgaagcagctggggacaattgaagccgagaaacggcccggcggaagcaatgcctagaaattagttgttttagcaattgtcctcaatgttgcatgcaccagcgagtacataatgtatacattctcggactcggactctgtactctgtatagctcacattttgaattaaaataacacaagatgcgttgatcttgtattagagataatatgatgacaagagaagaattgcgcgaagccagataactttttttcccggaagataacacccggcacgtgactgatatagccaatgataaggaggtagatcaaagcaatggaaagcagtggattggagattttatatagacaaaactcagggtttaggtgataaaacacgaagtaaacgtgagatttgataactcaagagtggaaatatggcagtagcctcatagtatgatacattgtccaaccctaacaccgacagaatccataaacgcaacatattttcttagatcggctgaatctcgccagcacgcatacatatccatgggaaagaagaagtagaaattgcttcgttacttcaagtcatccgatcaagaaacaaaacatttccaggtatcacaaatggccaacattttctggcaaaaaggggagagaaaaaatcatgtagaataccaatacaactcgttcattgggaaccttggccccgactatcgttttgttgaggcatgggcgccatgccgtaccctgttactggcacacctccactatcgggactgttggaggatactgagtataacgtaggccgaggaataccactaactgatggtacccgccctgaggctagaggactagacactgaaggctgtgacatgcctccagactgtggggttgcttggcgctgtgcatcaatcataggccagaattgatttgttgtgtcgagggttgggttttgaatgtatgtgtcccaagcatcctgatatcaacatgtcaacattgaacaccgggtcccgaaaaggaaaagacttacccaatccagattaacttgcgtgtccggcatttgcccgaacatgctactaaagggcgaaagtacacccggcatttcggccgaagcgcccacgccacctattcctgttcccattggtgtatctcccatcttgaacatagggtcagcaaagggcggagggcccgggttcatcgggctcattccgctgctcaacaggccgagggtcatggccgcgttctgcttctcgtcttgtggctcaaatgaagctccggcgctattttcaaggcctgggaccgacatgtgcagcttgctgagcatcacaccgagaaggctagacgccttccatgcttccatgctctcatcacgcgactcatcccaaatatctttcgagagttggatcgccgcggtcatttcatcccgccgctctcggccccatgtgtatgtgtctcccgatggccggccggtcacctgcaatgatacgccgtggtataggtcgagactgacaatggtggctgccagtaagaagtcggctgaactgagagaacttattcggctctgacgaccacggaggcgcccgctgtgagtttccgcgtgcaggagcgcctggacttgcaataactccattgctgagtcgatacatgtccttcgagaataggtgaaacgaggattttctcgggcgcgaaccagatatgggcgatgaagcacacactgagccttgttgtatacggccattacctgcacaaacgattagtgttgatgcgaattgtggccgctgtcagacaacttacgaaaaatcgcgacatgataacattgataggatccaactggcactcctccataggccgaatatgcaagtgctcggggatcatgtcccttgcctgtcggagttccgcgtcgacttccatcaccttttcgtatggggccgccgatacagcagagctttgttcaaccacacgtccgaatgcatatgacaggcgcgccttagcaatcatatatgagattggggttggctcattcaattgacgtggtggcgggagctccttgcagtcttcatcgaaatcatcatcgtacaaattccgtggtagctcagtatcgctatctgtactccggatcatccccggcaacccgacctggtatgaaaacagaaggtcggcttggcgcacaaaggtccagactcgccgtcgcatctcaccctggaaaggtgtgatatttgggaacattttggagtcacggtgatatcctgatcgcattgctaggcgaacaacaacgccggtcatgacccagatcgaaatatccgcctctcgggtctgggagaaatcgccatgcagatgaaacacgagcgcttcaatcaagaacgggtggggtttcgtgtagtcagccaatgtcaagcactgtgctacagaattccggaatcccccagccatgtccatggacttgccccggaattcaggtggctcatcgccttcgcggtggtaagacagcattgccagcctcatcattgcaaagagcatggcaatccagactagttcggtcgcggcaggatcatcccaatgtttattatactagcagagtcagattctggactcaatgcaattattctcgaggagcttacctgtgcttggaatgtgggtccatggagaacatctaggtaaagtcaggatcaagaccacaagctacggagatagcaaatactcacgggttgcagggtcatagcagttgaaatagcgagcaataagaatgtcagttgtatacttagacggcaagccagtcatgatctcgctacggctcatcggcttattgataccaaacaacaaagtcgagcctgatgaatcagtagatggtcgggccgccttgactttttcaaattgctcatcaagttgcttcttgtgcgttgtgaagaaacttcgcacctcggagatctattcgatgagttagaaagactcgagtttggtcaaacctcccagacttacatcgtttaatacagacgcccaatgagcatcactgatgtaataggacttgttattatccatcttcataataccaaacgacttcgtcacctggtccgtgtcgctctcttcggcgccctcctcttcgatatcgagatcatgggagaaccgagtcgagcccacactattttccccggagatcgccgccatggcagcagatggacccgcagactgagagccatttgtcatcaacgaaagaaccaagccttctaaccgatcgatgcggttttgcatatcatccggtgtagtggatgactgctgggacgagttcttcttgcgcgagttgggttgcgcgtagttacatgaagcagcatctcctcgtttgacacagttttcgcaaggattcgtacgattgcatttcagcctagaaccgttagtaaaataaaatagaaggtgtttcagccatgtcttgaatacttactttctgtgtcgacaaggcccacatgacaaaggtactcggtttcgtttccggacaactctgtaatctggagagtggccagcactcgacgaatttgtagaagggggtgttggggtcattttgaatggcatgatcatgtatgggtaaccgacttgttgtaatatcgacggtaatccgcggatgatgcagtgcacgttgagtcaacgttccagctgggcggggctctcaagcacgctgtggcagtccgcacagctctaggatcgaatcaaatatgctactcggttgttctgctagctcatccgaacaactttctcagtctgattgcaagcccacttctgaatatctgcgcggggttccaaacgcgattttgcttccttccctagtcgtagcaaggtatgtacagttgggcgcaacttcaatgccagatttggctcgtgttctaggcaaccgtgccagacccagaacttgagatgtggttgatgttgtacgcgactatttcgggcggtcaggggttaactaagccgcacagtatcactagacagatagcggggcaatgcgacgaacggatgtgcgttgtcgaagcttgcgatgtgcgatggccgaaggagggggtgttcggtgccgcgtggataagtgtggtcgggaggccaagtacagattcgaaagactatagagatattttgattcaagtgcgatcaaggattcttctcgagtcaacgatagcaacaaagaggtgatcataaggaaataaagctaggtagacacctgtggacgaggccccaacgaaatgatgattaatccgttatctccgggcgatttttcttatcaccagatgatctcacctcctgcaagtacatagagaggacggagtatccgcactccgtatatattgtgaaatagtctattatcttcgattcgatacatgaataccttcttccctcttgtgaaagctgatccagtcgatactttacccctatatcatattcattccttctctattttcctagacttgatgccgattggctagcaatcgacgatcagtgactcataggtagaattcaaccagacatgcatgtctcgaattctaccttgtgagtgggatctagactgatgtctagtttggaagttcgactcacactatgtagactgacttcgccattatggtacttgttcgtatattccgagtttaagcttaaaaagaggtgttagtttagtttatttaggtttacggatacgcctcgttttatcgctgtgtattctttaggtaactagtgcatgtacaactctgattaagtaaccctgaattatgtcaaatacacatttctcgtgcacaattcacatactttgtatagacaaactcggtgtcgtttccctccgcaaccatatagtatgcatccaggaagatgtcggtattatatacatccctttttcatcctttatgtctaaaggaacaggtgggttggaaaacgaaccattatcttgatcgatcgtatctgctcccatggacatcttactagctttcttccactttcagagacttggtgagctttcaaattgttgagcttggacatttggctttgttgtatggagcctatggatattaataacttcggggcttgtttagcaaatgactagaaaggcccacttctatattctttggtagggcaaggtggtcgagtctggtgacttataggacttatgtataagagcttaggctaactatggtttgactctatatttttagtatcgagagacaagtttaaccttgttacgctgcgaagggtcctcggttgttgaacgtcgtctcaggtgccgacgcacgggctacactcaaagaaggggtatactaggcatgcactaatatggggaatagcctgggtacggtctaacggacccatattgcggggtttaacgaatgattagcttgcactttgtatagggtactgcttgttggtcgagatacctctcattcctaccaaccaccatcgttcatcggatcctaacatgcacaactgccgatcgcagcgtctttatgtacgccaaaagcattttcaaatgctgacttcttttctttctagcggggaagattacgtatatcgtgggatgtgatcctgtatataacgtgcctcctcgtggcttctattttgaactatgtaggtctaagcaatcggacacaactatggctatcattacagcggttttccctgatgctgcatttcactatattttctatgcagttcctcttctactcctactttaccttgcccataattatttctacaattcgctaaacctctttcctggccctttctgggcgcacctgactgatatttggcggtatatcgatgtgaagggtcgacgccctgagcttacgcatatagccttgcatcgcaagtatggcgatatcgtgcgccttgggccacgcactttgtctttcgcagatccaaaggcagcgaaggtgatctacggtctaaacaaaggattcaccaaggtagagcagtgtcatgccgagcccagaaacatctacagcttctaatcaagagaacagtccgagttttacccagtacaaatgactgtttctaaaggcgagccattgccatcgctgttctctactctagatgagagcttccatgcgaatctccgccggtctgtcaatcatgcgttctcaatgagctctttagtacagtatgagccaatggtcgatgagactacgaaaattttcctcgaccaaacggaccgcctctttgctgatggagccacagtgtgcgatttcgcacgatggctgcaattcttcgcctttgacgttattggaagcattacatatagcaaacggcacgggttcattgagaaaaacgaagacatcgatggcatcatcaattccctggcaaatatcttcgattacgctgcccctgttggtcagatgccgtggctagataagctattttggaagaatccgatatttgacttccttcaaaaattgggcttatcagataattcacaccctgtggccatcttcgcaaagcaccgcatggaagaacgtctgtcagcaaaggctggcttagcagacccgggatcaaaggatgatcttctcaccatgttcctcaaggcgggtgaccttcgtccagatttcatgacgaacaaacggatccttacaatggctgtctctatggcctttgctgggtctgaaacaaccgccatcagcattgcagctgtgttctattatctacttaagaacccggagtgcatgagacgggttagacaagagctggacgacgctgttgagaacggtatcattgtgaaccgcccaacaggacttgtctcatggacagagtcgcggcagctgccctatctcgatgcctgcataaaggaagctttccgtatgcaccctgctgcgggacttcctttggagcgtgttgttcctgcgtcgggagtagagatctccgggcatttcatccgcggtggaacaatcgttggctgcagcgcctgggttattcatcgccggacagatatctttggtccagattgcgacatatacaaccctgatcgatggcttactactccaccggatcaattgaaggttatggatggaatgatgctccagtttggtgccggttcaaggacctgcattgggaagaatatctctctaatggagatttataagattgtacccagctttttgcggagatttgaggtatgttctttttcctaggcggagaccagtgatgctgagttcttgataggtacagctagcacaccctgaccaagaatggaaactgtggaatgcatggtttgtacgtcaacacaacttcaagacgatctttactccgaaagagattatagtatgatttgccgtcatcgtttagctcaagtattgaaacttgggagttgctatactttgtagaaagacatttctcatgaagttcaacaacagagatcttctttctagacaattgtcaggtttaaaaaagaagtaagcttttatgaaatgctgacgtgatacttctttcgggatatataattttgtttctgactagctttgcagacggcgcctatcaattagttaaagatgcggcggtgcctttcttgtatcgtaaccctaaatagagtaatatgctcctgatataacaacaggtttgtcactagttattatcctatagattcaatatcagggatccaagaataaagagcaaagaaaatccccgcccaataccaaccacaccatctgcgcatatttaggctgcaacatgcaactgacctatccaggcccgcctttccctttagggcaaggcgcagctgaactgggctgaaatcattggatatgccgaatcctcgaattcgtaatgtctttacctagcccatatacaacatactacttgaacccatgtacacgcagagctacagcagccaatggaagtatacatctactaactgaaacacagactagaagtacaccgctatatccctatgtctaccggttaaccgtatagactacggatagtcacagtagtagatatatgtgctttttttctttttctaagcagtagaagagctgttaagagtcacaataactatctactatattagcaatcctgtatatacatactaagcccatgatagtagagaatcgtgaggtgaggaagtgtcaaagtgtcatagccacaccattctacagctgcctctgggtacttgcatcgatgtatccaattgtcacctatcttcacactatacccctgctacttggggccagcgcagcaaacaaagaacttgtacaaacgataagtgcgtccactccaaatacttaataagccgtcaatccccattcccgccaatccgcaccgtccttcctttttattttgacgtcctcaaacccgtaaagtcatcttcatccaagtttatcttattatgagtgacaatcggggtcgtggacgtggtgatcgtgggggtgaccgtggccgtggccgtggtgatcgaggtcgcggttccgatcgaggccgtggtcgcggggacagtcgtggtgatttagccctccgcccagccggtagaggcgatggaaatcgtggagatttccgaggccgaggcggtgatagaggtcgtggaggcgatcgtggcagaggtgacttccgtggccgtggtgattttcgtggtaggggtgatttccgcggtggccgtggtggaggagggcgtgggggtgctacaaactttggcccgcctatcttcaggtttgccttcctcactcttcgctgctcatcaaacaaatctaatcctttggctatagacagggcgaaccaatcccaccacctaaccccaccgtcaccaagaccgagaacgaccttgccaaagctctggttgtgagtggccagaagaccgtcagacaggcgaaatatcccgaacgtcctggttacggcacagctggcaggcctgtgactttatatgcgaactacctgccgttaagcctgcctaacaagcagcttttccgctaccatctttccattgcagccgactctgcaggccgatctgcccctgtgggcaagaaggcccaacacatcgtgcgtctgctgttggaggagcacttcccacagcaaaagaacagcattgcctcggacttccgctctaccctagtctcgtgcgtcaaattgaccgagggtaaattcgatgtgcgatacaaggaacacctggatgatgactacatcgatcctccccgggtgcaccaggttacttgccagtatactggtgaggtcaatcctgccgacttggtcaactacctgacctccaccaatgctggtgccatgctagaatccaagtcggagattgtagctgccctcaacatgatcatggggaaccaccccaagacggacgatcaggtcgtctctgtcggagccaacagacactacagtctgcgtcaggataccatggaatcgttcaatcttggaggtggcctatccgtcctgcgcggattctttgtcagtgtgcgtgccgcaactgctcgtgtgctcttgaacgtccaggtcaaatatctggcatgttacaataaaggacctctggtcaatgtgatccaagactacggcaatagaaactcttaccgcttggaaaagttcctcaagagcctccgcgttcgcatcactcatatttcccgcaagaacagccgcggtcagccccggcctcgcatcagacctgtctatggcctggctaaccgcggtgatggtggctcggcgcccaacccacccaaggttccccgccacggtgctggtccccaggatgtgcaattcttcctagccgaatccagccctcagcccgtcgccgtgcctggtgcgcctgagcccaagggaaagaagggaaagaaagctcccagggccggtcctgcggaagccggtcgctacattaccgttgcggacttcttcaaaaagggtccgtcgatattttttcctttaattttccttcggctcccttcctcctcgtgttgtgctgactttcctcttagagtataacatgactttgaatgcgaaccttccagtggtgaatgtcgggtctcgtgagagacctgtgtatcttcccgttgaggtctgcgaagtcgagcctggtcagccagctaagtccaagctttctggtgatcagacagccagtatgctccgcttcgccgttatgggccgaaagccgggtcagaacgctcagtcgattgtcaccaagggtgtgggtgtgctgggactaggcgagccattgaatcccacactggtaaacattccctcgctcccaaaatcttgtcaagctttctaactttccatttacagtctgctttcggtattaactcttccacccaactgatcacggttcctgggcgcgttctctccgccccaaatgtctactacaaagacggaaacaggaccaaggagatcaggactcaatatggcagctggaacatgcgccaaatccagttctccaaggctgcatccatgaaatcttggacttacctctacgttgatcaggagggctcccggccagttttccaaaacccagctcagctcaacgcgtctctggaaggcttcagaaagacactcagggatatgggaatggctgtggacccccacaagcttggcaaacgtgttgtcctgaccggcaagaacgacgctcacgatattcagcaagccgtcgtcgatctgcagaaacagcacaaccccatcttcattctgggtatactctacactaaagacactggtgtctacaactgtgtcaagcaagtctgcgacgtccgctgcggaattcgcaacgtgaacgttctcgcagagaagctcatcaactccaacgaccagtacaatgccaatgtgggcctgaaaatcaacctcaaactaggcggtgccaaccaggctcttcgcacccaggatctcggcataatctccgaaggcaaaacaatgctcgtcggcatcgatgtcacccacccttcgccgggctccgccagcacagcccccagtgtcgccggcatcgtcgcctccgtcgacgcaaccctcgcccagtggcctgccgagatccgtgtccaaggcgcccgccaggaaatggtcgccgacctcgaaaccctgctcgcctcgcgtctcctgcactggcgcaaactgaacagatccctcccagagaacatcatcgtctaccgcgacggcgtctcagaaggccagtacaacaaagtcatcgaggaggaactccccctcctccaggaagcatgcaagaagacgtacccagcagaccagaccaagaaaggcctcccacgcctggccatcgtcgtcgtcggaaagcgccacaacacccggttctacccaacaaccgagcaagactcgaaccgcgagaaccccatccccggaaccgtcgtcgaccgcggcgtctccgaggcccgcgactgggacttcttcctgcaggcgcactccgccctccagggcacagcccgtccagcccactacttcaccgtctgggatgagatcttctacccccgccacccagctaacagcaccgggcccggcgcagctgatgtcctccaggacctcactcacaagatgtgctacctgttcggccgtgccacgaaggcggttagcgtctgcccgccggcgtactatgccgatctggtgtgcacccgtgcccgctgcttcttgagtgacctgttcgaccctatgcccgttgatgcttccggtggtagcaccagtggcacggacggcgcgttggaaatgactcgcacgcgggatgtcgtgatccaccctaacattgcagagactatgttctacatctagtctgcttttgagaatctgcgttccgtcatctatctgctatctactatgcgttttgcgtatcttttgaattctgcttgactcgacttggataaatttggtggtggagagaattggaaatggaattgaaataatttgatggaggaatgaattatggatatcatttggacctggaagacctacttacattcgctcgctcatcgttggtctttggaaaataccgtttgggatattctgtctcgcttggcttcgatactggacactggagactgtttcttatcttagacagtaccttagctgtgagactcaattaaatcttgaacgatgacatcttttgtgatccctgggtaggtgtattatattgttctacgctattgaaagtaggaccaaggaatcggaagtataacaccataaattaagagattaacgaatcccgctctcatggaaataaacttgtacactaataacattttgagggcaaggtacagaaataaacaagaaggcaaaaggttgaatagtacacgcaggccaggcattccacactcgactccaactaacattgaatttccaagcgcgaaataaaaggaaagccttcagcctcgattgtcttttttttgtgattttgcagtttcgcggacaaatgtccaaaattaatgcgggtatcgatacatattgttcagaaaaagtcggccgttgctcgtcagaagacgccgctgacaaggatacacacgtagtatcgagctaagccctagaccagcgactagctcacttagttgttgtctccgtggttccagctgggctggttgtggccgagggggttgcgctgcgcagtggcattcctcctaaccggctcgggggatgcgtcgtcaaagttaccccagtgtggctccatcatcttattgtgcttgtcgtggttttgggtaggcttaggaggggtcggctcgtcgtagttatcccaatgggactccatcatcttgttgtgcgcgtgatgctgctgggtaggatgagggggggacggttcgtcatagttaccccagtgggactccatcgccttgttgtgcttgtcgtggttttgggtaggcttaggaggggtctgctcgtcgtagttatcccagtgggactccatcatcttattgtgcgcatcatgtctttgggtaggcttgttctccttgacgggcgattcgtccgtcaggtcgaattgcgaagcgaagttcttcttgcggttggcgacgtttccgcctgttggaaggggctcgtccttctgctcgcgctcggagagctggggctggccgttgtcgtcaaagaggcggttctcgtagaggcgcttgccgcgacccccgaatgagctgatgatccgcccctcgtccgcggattctgaatcggtcatgtcaaagtggcgatctgcgtcgcgacggggcttggccacgtcctgcttggtttggggggatccggcgccttcttcgtcatcgccaaagccaaagtggcgtacttcttgcccgcgtaggacgcgctggcccttcacaggggtctcaacgtcgttgaagtcccagtgggtttcgtgtttggtgttggcctgcctcacttctgctttggcctcgcgctccgagttgtctccgccgatctcgaagtggtcgtactttccggggacggctttgtagtaatggcggtgttcatcgacaggtccggtgcgcgagtcgggcacgtgatcatccttcacgaaaatatcgctgaagttgcgctcggcaggtcgcccagccgagggcgcaaagggagccacaggggcgcgaaccttcttggtaggggacagaagctcagtcaaagaacccgctccgtaggggtctggggtatatttcttggctgtggatggtctgctgggggtcttcgcgccgctttcgggctcagcgacctccttgactggcgagatgagctcggtcagggagtcggctgcgtaggggtccttgatgcggcgcttgccagaggatgaggggcggtgggggagatcggtatccaacttctgggaagaaggctgcgagggggtcccacgcgccgtctcggcgtctctgaggagacggagttggtcttttccatcacgaatgggccactggcgtccgcgcgctccaataacctcgatttgcttcagcaatgaggcctgatcccagtaaattcggatctgcttgatctgttgattggtgtcgaagtggacgatgtgaatctgcgggatgatgcattagctttgataagcgacgcgcgtcggggaatttaccgtgggaaaggtcgcgacacggtcggccaggaaattatcgtcgagtgaggggagataaaccccaccaccctcggtgaattcgagggttgtctccatgtcgagacatagcgagtctgatccttcaatggcgctgatgaccttgttcgatttcgtcttgaccaccttcgcgttcttcaatacatgagtgatcacgttgtcggacttctcgaacttcgtcgtggtaggaacatagatcaaggacacatcgtcggccaacttagcagccttggggttatccaggaaccgctggtattcggtcttgaagtaggacattgtcaaccgtatagggacagggggtttgaaagggggaagatattccagagaagatagctactctaggatactccagaagtaagctagacgatattgaagttacaaagaaactattttccaattgagaaggggaaagagagaaggggagaagggaaaggaagcgatgtcctacgatgcccaagcgcgggagtcccaacgtacattactcggcataaataatatacaggggaaacgccagaaccagttagtcatcggtaccttgcatatttagttaatgcagatataaaatgaagtgaaaatgcagtagaaaacacgctgaagtccctgaaatcttctggaaccgtctgaaaacacgccagtgtttcaccatacgggctaggcttggggcttggcctcgcgtctctccggtaactggagaatctggagaatacactttaaaggcttcaacctctacagggggatggattgcacaggggacatgcagcataatgtacattgtacatttcagaagtactggattgaaatgcccctccagtgggtgacacgatctctggcgagtcgggagtcatttcaacagtctgcaatgccgattattcaaatcagacactctcgagtagaagacatgattggtctttcattgaagtatagccaaagtcgaagtatggcatatgtaccgagtagggacttgtcaaactccagctcctgaccggccaattcatttttttcctgtaaggcagtaaagccctcctaagcacttgtcgtatctttgaggaacgatagatagcatggtaaattatcgtatgggcgaaaaaggtgggtatgtgttgcaatcgtgtctcattacaaaggtctgttgacggaaaccgcgttagaaaagatcccatgtactgggcgtggtcgaaggacttacccaagataatcctccttgatggtgccaatggcattgatagcagccacgtcgggcttgacaccgaggatcttcaaccgcaaactggttcctttctcaatcacttgatcggcatgatcagtgtattgcggcggcacggtgttaggctcccatttgatatcggagggaatgttctgattggttgtcagcagcgaaactcagagatccatggtcagatgaaacaaaacatacctttcgcgcaatgaagacagacaatgggcccgccagggtgaagatacccgtgggcttaacggaggtaacaatggcatcgacctaagctcagtcagcgggaagccaaaggccaaaaccttgtattccaagcgcataccgtctcgccacggaacggcttccagatgatcgcacgatatctgattgtgtattccgcctgtccgattccaggcatcacccgcccctcgccaatatcaaccatgtccatcacacagatcacaaagtgatcacctgtgcaccgtccctcttcctcttcgttgagtcggccgatgaggtactctcgcatgttgggtccgaaataggacgggtgcatagaaatcaccttggtctcttctttgaggaagaacatcgtcgcggttatggttgaatgaaaatgcgctaatgaattgcggagtggaaatattcaagtcgctttcgggacagtgatgctgtcaatcgaggtcgagggacggcgttttcgaccacgcgcgcatgacctgcaacggtaaagcacaaacaagatgtgggatgtggctgctagaaatgagcgaaatgagatccgagtacccgtgggagtggcagagattgtatctgccttggaacttgaacgaggaggcagatacgttgctgcaggcgcaagctttcctttcgtcaagagcatctcgtgggccaggtttgggtgggtggagtcacgtggtacgattcttgaacggtgagaagttgacttgagatttgcacattcaaaaatactgcaacttcaatttttttccggtatattagttaatggaatacgtagccaatattgcacttgatgatgatttagccatgacctggtggaggattagttcttatgtgaggaatgattggatgatctatagcagaccaaacaacatgtacagaagtaaatagtgaactttcctgacttcgctctcgattcagcttatgatatcatttttacgccgtatatagccttgaccggctagcgttgactagttattggttttcaaaaatcggcttggatgtataccgctagctatatatatcagtctactccaaactgctgtcgtcaatttcaatatttacattacaaccgagcgctaaattgacaatatggaaggcatactagatcttcatcctataaccctagggaccatgtaagaaaatacctaaacttgtaggaaaatagtctaaagcctcactggagtattatatactccgtagttaacgaccaatttaatgagatacgaaagagaatcccaattaaaaccactatgtatataatcaattacctgtccctaggtaatgtaggatctcgtggtgaaactataaatgtagatgatctgataggcttgtgcatggcgggttggtgtataccgttacgatgccaagaccaacgtcttctaagcacatgacgccagggccaggacgaagatcaattgcaccactcaacgctttccgataatgagaatgccacttgcctgatcccatcaccccgcaaaactcttcctctagaattccccatctttttgttcccaaaccggcaagatggcgcttaatcttgagaaacagttactcttcgtaagtatccgcatccaattcccagaacgactagagctgactgtgatttagtatggagcctaccatagcaatcccgtacatccgccctaccctcatctcgaataatatcaacgctcactaacagcgtaggtcaacgtcgcaatccacatcacctgcgtcccaatcctactgtttaccggcatcgtcctcgtacgtgcatctcggcattttacaaccgaacgagatattcccagtgtacaaaagtactaatagtgactttcaaggcctgcaactgcccacccctgttcaccctcccggacattatccgaatcgaatacctgcccgcgaatgccggcacaatcggcgctcttatttacgctactttttatatcctcctagagcccattgccggcggtctactcgcacccgccctgatctcggctgcatactacggaaactacttcctcggcacgtacggaagcaccgtgaactactgggccgggggcatccacgtcgtgtcatggctggcgcagtttgtcggacacggcgtgtttgagaagcgtgcgcctgccttgctggataaccttgttcaggctctcctgcttgcgccgctatttgtctggatggaggttctgttcttcttcggatatcgcccacagctcaaggagcggttcgaaaagggcgtggagctggagattctgaagttccggaagcaggggaagggcaagggcaaggcggagcagtaaatgcgggtgtgggtgcagcacgcagcaaggggaggtattgctcgccaagatcgagggccgtatgttctcgggttgtcgcggttggtgttggaagcttcagtggttccatgggcgcgttgattcatatgtcctgttattagcaagcgatttccggcgcatttttatgcttttgcgagtgtcatctcgcattgtctttggccaatggggatatgttgatccctttcccgtggagtggtcgttgctgttttggggccaatgtgtgattctattgtatggtagtatggcaatgccaagtcagtcgactgacttggaaacaagcaaataatactgcgtactccgtagataacaacatcagcatacaaagtatacaaaccgcccgtcttcggttgccgtgacgaaagccatgacataagcgattcacctgaccaggaattccgccgatccgagaagagaaaaaaacggaaggacacccgtggcacactcttccggtcggcaatgcaaatggaagcaactcattctgggcttgtataatattttgaaaaattgggagaatttgtagaaatcgaaatatagaaaagggaaaaaaatacatataacattgtaggactaagaaaagtcgtaggagatacaccgtggctacactagggccacctcggagggcccagggtccgaaacggtttagcgcgagtcctgagaatccaatcctccccccgacgacaaagctctccctcccgtccacaatccctctctcctctcccgttctcctctccccaattacatctctccctcagagaattcatcctctcatcctctgaaccccctttcacaatgttcagaaacgctctgcggtcgtccagccgctccgttgcggctgtttcggccactggccgcatcgcctcggtgagtctatcccatcccagccgccttcgtccatcgccagttcgacatccttcatctcaatcctgagctcgattgatcctcatacctcctcacacctcgacaataatacatcaacaatagctaggacgcattgtccttctctgggatggtcattaacaggtttttcgtcaattacaggtccgcgcggctgctgccggtcctctcaacggcgttcgctcgtacgcttccgaggccaaggctacccctactgaggtctcctccatccttgagcagcgcatccgtggtgtctctgaggaggctggtctcgctgagactggtcgtgtcctgtcggtcgggtacgtcaattctccctaggcggctgggggcgcgaagaaaaattcggtccccggttacaatgccattgaatccgccattatttctcaacattcgaaaaattaccgatacagaaactaattgaacttcaaacagtgatggtatcgcccgtgtccacggcatgaccaacgtccaggctgaggagctggttgagtacgtgaacccccaaagtcttggcattatgcctattcaaaaaactaacttatcttcaggttcgcctccggcgttaagggtatgtgcatgaacctcgaggctggccaggtcggtgtcgtgcttttcggttccgaccgtctcgtcaaggagggtgagactgtcaagcgtaccggcgagattgtaagcacttcaatccaacccctaggttcattcttatacttggacattgaatctatccacgtatggcaattctctaacacgatccccaggtcgatgtccccgtcggtcccgagcttctcggccgtgtcgtcgatggtctcggtaaccccattgatggcaagggtccccttggcaccaaggagactcgccgtgcccagcttaaggcccccggtattctgccccgtcagtccgtcagccagccagtgcagactggtttgaagtgtgtcgactccatggtgcccattggtcgtggtcagcgtgagttgatcattggtgatcgtcagaccggtaagaccgctgtcgctctcgacaccatgctcaaccagaagcgttggaacaacaagtccggctctaccgaggaggagaagctctactgtatctacgttgccgttggtcagaagcgttcgactgtcgctcagctcgtcaagacccttgaggagcaggatgccatgaagtactcgattatcgtcgctgccaccgcctccgaggccgcccccctgcagtacattgctcccttcactggctgcgccatgggtgagtggttccgtgacaacggccgccacgccgtcatcgtctacgatgatctgtccaagcaggccgttgcctaccgtcagatgtctctactgctccgtcgtccccccggacgtgaggcctaccccggtgacgttttctacctgcactctcgtctcctcgagcgtgccgccaagatgaacaagactcacggtgctggttccttgactgccctgcccatcattgagacccagggtggtgatgtgtccgcttacattcccaccaacgtcatttccatcactgacggtcagatcttcttggagtccgagctgttctacaagggtatccgtcccgccattaacgtcggtctgtccgtgtcccgtgtcggttccgccgcccaggtcaaggccatgaagcaggtcgccggttccctcaagctgttcttggctcagtaccgtgaggtcgctgccttcgctcagttcggttccgatcttgatgcctccaccaagcagacccttgcccgtggtgagcgtctgactgagctcctcaagcagaagcagtactcccccatgtccgttaccgacatggttcctctcatcttcgccggtgttaacggtctcctcgacaccatccccgtcgacaagatcctcacctgggagtctgacctccttgctcacctcaagagcacccaccccgagatccaggctaccattgagaaggagggccaggtctccaaggagactgaggccaccctcaagaagaccatcgctgccttcaacgccaccttcaacgcataagtgaagaaacaactcggatgatccctcgtggtcggctttgttttcttgactctatgtgtatagacaagatagcctgtacaattttgagcccattgtttttctgttcttcttggtgccggtgcctggcaggagatctcagtctgcccctggatgtagcgatgtaattatctgcatgatcctggggggcggaccaaggatttctcgtagtgctgttcgagcgagaactcaaatgactttggtctgccaaaatgtgattatatcctgtacgtttagattttatccgcgcatcgggggcgcgtgatgggtggacgaccgttctaattccgtctggtctccttatgctctccatgttggacctcaattattttcattttttcattgttatatcgtaattctagactgtagatttggtttgcacgactgctagacgtagtattccatcggatgtaccgggttggagatatgcgaaacatggcaacttcagtctagatacacgccaatcgaccgacggaactgaatataagcctatttttatgcccatttttacgacattctataccacggcatatcattgaaaagacacgacgacccggtagtagaggccgaaaccggcatccgatttgttatcgataagcgatcaagattttcccggagatcaccaagtcccccgcgtgcaagcaacttcgcttttctctgttactgattatatcgttattatcgctctatcgccgtcatgtctgcccctaccgataaacctccctcctcctgcaaggtgatgttgagcaagaatgttgccaaccatctcctcaccgaagtccacgagggccttaagaccctcgagaagccgcctcacttggtcggcctgctggccaataatgaccctgcagcgctgatgtacgcgcagatgacgcaaaagacctgcgaggagaagtgagtctctataatattctgattatccggctccaatggatccaatggcttctttggtgggggtagctagtatgattcatacatacccctccgccaacaaaaaaaaaaaaaaccaaaaaagcctagaacgaccctaaaagcacagccaacacctcaaaacacaaccagaaatccaattgaagcaaccgactaacgcaatgcctttcccagcggcttcaagtacaccatgcgcgaggtgtcccgcgacgatatcgaacaggccatcctgaacgcaaacaccgacaacgacgtcgacggcataatcgtctactacccgatcttcggcacccgtcaagaccagtacctgcagcagatcgtcgacgtgaccaaagacgtcgagggcctgagccaccgctacatcttcaacatgtaccagaacatccgcttcctggacggcgaggccaagcgccagaaatctatcctgccctgcacccccctggcgaatatcaagatcctcgagtacctcaacatctacaacacaatcctgccctacggcaaccgtctcttcggacacacgatctgtgttgtgaaccgctctgaggtcgtgggtcgtccgcttgctgctctgctggctaacgacggcgcttgtgtttactcggttgatattactggtgtgcagaagttcactcgtggcgagggattgcagaagaacacgcatgaggttgttgatcttgagggaaagactttgaaggatgttgtgccgctttgtgatgtggttatcactggtgttcccagtgaaaagtacaagttcgatacgagccttctgcgtgagggtgctgtttgtgtcaacttctcaagcgagaaggtatgtctttgtgtttttaagtctggttatgaggttgttgctgactgttctgatatagaacttcccctacgaggtccgagacaaggcctcgcttttcgttccctctattggaaaggttactattgttgttctgttgcggaacctgctggtatgttttatctctatacttcattcgcatgctcagtggtccttggtaacatctaacatgagaaattacagagactcatccagaacaagcgaatggacgatgtcaagcccgccgaggctacggaacgacctggcaccctcgaggcatcatcgtaggtcggtcaccaccggttgaaatttcaatctcgatggccatgcattgagctggccatttcgtaaaaaaattatagatattctgtttgttattagccatttcgattatactctgagacttatgtttcttcttttgtttcctgtgcttagatatccagtcgcattccatggttgaaacttatagagattggctctgttgcctttgtctattcttctaacaaggactgtttcttgtttaataccatagcttgttgtttacactctgactttgcataatacctcaatagaaaactgctggcgggctcgaaggatgatattaatatactaacaaattgccccgagaataattgggactggtaacactcaaacctgtaacgcgcaaagagccattcagttcaccttggcacaagcttaacgaacaaagacaagaacgatgacaagaactaacaggggaaaaaacacaagagaaaacgcaatcaggaaccaatagggcttcaacagaagaagccaccaaatgatgagatcgccccagtcactctcccaatctgcgaactcatcagccccagtcagaatataccttagcgactcaatcgctgacagttgactattatcactgatagcgaccttctggaggagttctgcaggaaacaaaggcgtttccggcacgagaatgacttgaacgtaagggcttatagcgctaggacccacgattccgatcatgcgccgtgggacctgaagcccaggtgccaggacgatgaggtggatacaacaggtgtaattcacacgccggtcgagtctctttgtctggatacagtagaaatagccatgtgaatactgttcggcggtgcgctctgtttcttttcctccagactcatccacggacggcgtagttgttacattggtcatctgttctatagtgactgaacaggcttccagtcccttgatttcaagggtctcggtggcatccacaagcgagacaatgtcttcgggggaaacccaggcaatgactactgggaactccgggagagctgaaatgatcggattgttagttcagtttctcactcaaacaccgggattcggcgcggcgagagcttaccacgaggtcgacacagagtagatacaatgtatcccatgttggtggtctttacgactgtggaagatagttgtgaaggagttttgatgattcgaacttgattgagagtcaaaccatacagtctaagagcaagtgagcagcaaggtgcaaagttgtccgaaatctaacatcattaatccccaggctctgacttggaaggttcgagtcaacccgaggtctctccaagttgggaaagtgcagtacagctccaggaagtgatccacgtgagctcaatagccctagctaggacatcacattctaacagatcaggctaagacacccagcatataatagtttttctctcatgtcgagtgaggtgcaggtgttgcatacgagattgctttcactgccggtcgatagtgatcaagtcacgtacactgttgggatgcttctgattaactatgcctagtgaaaagaaaaacacagaagaccgacctcttccttgctcatttgaacatgtgatacccatgtactctcctcaatctctcttagagaatgaactggctttgcagtttgcaataaccctgaaaacataatatctgatagtaattgataggcaaccttcctctagccaaacttcttctcattttccttcgctgccaatctcaaaacatcaatctcgctggcaacccagcgacggaaaggctctgggtggaatacaccatctaccgagaaccaagttgtgaagggcgcctcacaccgcttgtcctggagaaccttgccagaggcggacttataaatgacatgcaacttgtagagcttggagaactttttggttgacgatgacacagatatctataaacaagtcctgttagttacctggccaaaaaaagaatatcagaacgaagactaattgacataccgtctccccagtcttcctcttcccggaatatacctcgccagcctcgacggcccaaatccagtatgtgagaatggcgttcaagaagaagtatgtccctactgccgcgataatccagggcgaggtagttgcttcccagccaagcctgcggtctgcatagaaagtaaaccctgcaattgcgacagcactatatccaagcaagaagcgaatgttcgtcttcgagtagtccggtgtaaaagcgtatggcgcgggaaggttggtgagataaggaagcagagcatcgtcgctcgtagatttgagatctgttgctcacgccgttagtgttgttgctgtatagagtatagcgggattacgtaccattggtcgagtagaccggcaccttgctggaagccataatatattcgagaatagatgcgagtaaagagctttttaaaaccaaaagaccgagtgtggtttagcagactgttgtttaccgcaggacaaagatgcggcgtggcccttgggagaaagctggagctaacgcgggccaatgacatccctctccgcctggcaacctctccttcgcggccccttcaactttccatcccccacctgcagccaccactaatttattgttggttcgaaggaggcacttcttcgattcttattctgcctcaacatggcaattcaaggggctgatcagaccatccttagggatccggcattattgtgagagaacatgattcgatcaagcggaagttggactgaccatttgcttatagctattggattctatttcccatttcaattgttatggtatgacctgcactcggtgcttgaagctaaatattcgcgatgcctctgagactgaaactaacctctcttattggatagatactgactggaatccttcgccactatgctacggtcctcatgaacacgaccccaaaggcgccatccactcttgccgagtctcgcgagcgccttgctcttctccgcggtgtgaatctccgcaacaatgcctgctccgtgctcgaccgcgagtcctttgagatgcgcaagaactacatggttactggattccgcaatggcgcatttctcaaggatcccaataatcgcggccaaccgcccgcgaaccccatgactgatcctgcgggcatggaagctatgatgggaatgcttaagggaaacatgatgatgatgatcccgcaaaccctgatcatgagttggatcaatgccttcttttctggctttgtcatctgtatgttgcaatttgatataaaacatgagcaacgagcttacaaattctgaagtgaaattgcccttcccgcttactatccggttcaagtcgatgctgcagtctggtgtcatgactcgcgacctcgatgtgcaatgggtctccagtctttcatggtacttcctcaacttgatgggccttcagtccgtttttggattcatcctcggcagtgataacggtatgcatcaatctgaccttcccaataagagttctcactaatatttatagctgccaatcaaatggcccagcagatgggtatggctaaccctgccgcaatggtcaacccgctccagcccggccaggatcccgacaagttgtatctgaacgaagcggagaacctggaggtgatggagcacttctgcattctcgatggagtggaagagagaatcttgcaaaattttgctcccgcagggatctaatttccgttttgatgtcccatgtgatgtctagtgttggtgtatatacctgtcttgaggtcatcgctggttttggatagcatacagaatagaatgtgccatctttgtaaacaagccgtaatctcgtgaccacatgatttactcgtgtcttctcgaatgatttatattgctcaatttccatgactcgtacttcataactaatctcaatcactcctggtggtaattaataacatcgttcagaatccagacttccccattattgaccttctctgcaattgaatcaacttcaatattgccaggttggatctatagacagtcagttaccataccaatgacttgtaggggataaaacctacaaagatcttatcaccctccttcgtccatttcaacttctcccctgcaagactctcaacttcttccccaactctccaaggactagccgggatgagatgggcctctacgaatcgctgtagattccgtttcgcccggtcttgaccatcctggccctcatatgcatttacctccccgaacttcttgtaatcctctggattctcccagggcttccgtggaagagcctggattgcactgttgcgtggtgctagaactgttatgttcttggacgcatcgttaaggcggctggcgatgggatcaaagtcacgggtcaaccgcgcaaagatattgatgcccttggtcttgggcaggacatctgagatgacagggctagcgctgtctttcgaggtcaaatcctcattcggaaccgtcttctgtggctggacaacaccagggagaatcttatccattatggatcggtgctcttggtgctcgagagctagtggctgttgacgcgaagggaagggagatgataggccccaaagtgcagatgcagatgtagcgagaagaaaagtaaataaaatggatgttagtcgattcgatttcatgctgcgggttggagccatcttgctgccaatgatgctgggcagcgaagcaggtctacaaccatgacgcaacaggcagtggcacgtgatgtggagagataacagaatcacctgatccttatcgataagggcatccggccacaagaaattggccgatgtgatcttgatctttccccccgcaatctacacctgggtctcccaattgatcaattggtatcatgtcggctttgcagacctttatgctggtcgtggaccacgacaaagaagaagccaagcgcattgccgagggaagcgcgcatggtatgctaattcgccccgcactcgagcccacttcaaatcgttgcattactaacggaagcgatagatattgagattaaaaaagtgactttgcttgatactgtccaatctctcggcgaatatattaacgacgaagacccgatcttacgtggaaaagcgatttccttccttacggccattatccaagccctctcgccgaaatacctctcgagacaacagattcaagtcctgactacattcttctgtgatagaattgaggatggaggtgctgttgatgggctgcaggccctgcagggcttggaccgttttaacaagtttttggctacccaagtagcgcaagcgtaggtgctatacttttacatccctgtattcgccggggataaagcttaactcaagatgacccagtgctgatttattgatatagacttttttccaactttcaagatctccagtctcggtctcaaacacaacgattccatgtctatgaattgcttaatgacttgatgtcaaaccaccgcggagctatgcgtgatatgggagatatctcgcttctaggtgttgttgatattatgacgggagagaaagacccgagaaatttgatgattgtattctcgatcctgaaagtggtcatggtggaatgggacatttcgaaccacgttgaggtatgtgtaatttcccaagctcggcgatcccgctaacactagacagactctcttcgactcggtatataactacttcccaatcacattccgacctccgcccaacgacccttatggaatcaccgcacaggatctgaagggtcgtcttcaagagtgtatctcttcgacaaggcattttgcgccccactctatccccgccttattggacaagcttgattctacttctcctaatgtaaaggtaaaattgctcaacactccgtgattcgaaagccgtctaataaatctatagaaagatgcacttaatgcattgatcgcgtgtatccatttatacgaccccgacacagtgtccaggtattccattaccatatggggagtcctcaagtttgagattctcaatgcccaagaggagttcttatccgaagcctccctcgaggctctgcaagcaattgcccaacggctatccgaaggagttaccgaagtgtcgcaagaattgcctcttgcaaagtaccttcagccaatcaccaaggagtgcaatgagcaactccgggagccccaaaacaagaaggccaatccggcccaatcgatcctcagctgtgtgtctgctgcttcgcccgtttcctttgtccttgttgtacaaacagtcgtacctccgattttcacactttaccaagaagcagacggaatcgtcaaacaaagagcgcttctcgaaactttgaatgtcttgttcgattctgctacaaccgtgtttggacaatggaccacccgagggggtgaggcggctatcgaaaacccgctactcgaatttaaagaccaattctcagacctttttggtcaggtattgatgggtgcagcaaaggaagaggtttccttccgggtgactgccttgaaaggcttcttgcgtctgtcgactttgcgtgattacttccaggagaatgagattgggcttttcgtacaataccttgacgaaatccttctcaaggaggagtccgtgggccgggatgatctcaagaaagaggcaattgctgcccttgctgagatttccaagcacaagccccgcctgattgtggatatcactttccctgcatttgtggcaactctgccagaggaagatgaagggtcggatgcccggtatctgccgacactcgagacccttgcccagatcagcgtcgagagggacatcttcgagacacttttccgtcgtcttttcagcaaactgtccgttctgctgcaaaaggaggaacccgggtcagttgcttacccacgtgcgatcctcgccaccttgctttatgttatgcaacagagaaacatggaacaagaccagagtgtggatttgtacttcgacaaggttgtggttggactttgccgcgatgtcgcagcatcggcgtctggcaagaccaagaatcggattctcaatgatcctaccgtgcttgacactttgggtcgactctgtaatctccttgtgcggtctgtttccattcagaaacaggagcaagttgccgaaaacgtctacagcctcttctctgcagctggagatttcgtgcctcttccgtttactcagactagagaagccgatcgagaacgtacgatcattatctcgacatacctgctcgcgggattatccaaggactatggtaacaagatcccgcacaccgacccagacatggcggggttgctgttggatctgatctatcgttgtgtcttgagcaccgaaccagcaacacatcaagcctacctgcgccacctggccttgctcgtcaacaagttcctgtcgaagcaggatgtgccaatcgccgagagactcattgattctctcctcgaaggcgagaacaccgaattacagagcctcagtcctcctatcattcgcaccatcttctggctatctaaagccttgatccttcgcttagcccccgcaacaactcacatcctgacctccctcctcgctctcctctcctccccagaccaagaaaccagcgcgacggcagcacaaggcttctccataattctaggcgaagacgatatcatctccgcaaccaatggcgctacaatccgcctcctgtgcagacagcgcctcttcacaacagtcatccctttgatctccactcgcattcgcgaggtgaacatcgccggcacagatggctcccaccccaccccaaaagcgcccgaccatattaaaccagcgcacctaaccgccctcgcgggtatcctctccaccatccccacggccctagtcatgcctgaactccccacccttctccccctcctcctgcaatccctcgacctccagaccgccgactcggtcgctgtccgcacagcaacgctcgacaccctcgccgtcatcatccgtgacaacggcgtcaccgtcatcgaccggtgcggccacgtccagagtcttgtcacgagactcctcaaaacaacatctacaaatatcggccctggtgcggttaacagcccccgtctccgcgccgatgctttgaaatgtctcaatctcctcgctacgcaccaggtgcccggcgctgcatctaatgctccgccgggtatctcgcctctattacctgtcaagaatcaggttctgaggtccttgcgagccgttcttgacgaccctaagcgtaatgtacggaaggcggcggttgatgcccgagccgcttggctgcgttgtgtggatgatgccccggacgaggaagaatgattatttttgggttaatggaaaaatatactcgcattaaatttagaggttgtttattatcatatattgagcatagatggacatcggggtttccagttctcgttggtgtaatcgcagaaggaattcgagtgcagtataaaattgtgacacctctgctgtgactgtaatgtgccagatccgaagagtaagagtacatctaattcaaaccaactaagactgagagaagaaggagagagcaagttgagagtgaatatcagacatctcgcttagctagtaaacattctatggacaaggaaaatagcaaacagggagcaagcaagcagaacaatagctgagtcaggacagctataatagtaattgtaaaccccaggagaatgataatactttctgagaacatttatatatcaaattcggaaatgacttgactatatcttcaaagaaagagctctatatatgattgacctgcacccacagcgtctagtctcacttagaaatgcctcgcgcgttccattagatagaaatatatcaagtgaccacaatctccggtatataaagtcctcgtcaactaccttccaagcttccatcacttcccagtctacaaaacagtcctggggagcatataagaactgcatcatttcaatatatcaacaatcatgatcaatatatcctgtttttctctgtgggcttctctgtcctgtaagtttggttcccttttatttcaatctcttttttatttgtctctttctaacttctagccttagtgcccctccagcactgcgagggcgtagaatccatcgggcatctctctcttgaaatcccgaatgggtggcgttcaatgcgcgatgggtcatccagctcccggtatagcagcgaaaatatacccacccacaaaaactttaatgatcactatacctccaaccaaccgcgattctgcgccgagcgaatttattcttgaggatgtggctgagctcgtccgaaggaactgccggcgcagatggataccaggctcgctgggcatccaaggttgtcccctacgtctatgggtttgatgtagccaagtcatcgctgaaatggttcaatgaggtgctgaagaaatccatcgaactcttcatcaacgctgcatacggggatcggctcaaggtatacacgcgggtccgcgctgctgctcttcgcgaaaattggaacacgcttaagtctatgccgatgctgacctacccgccgtttccactctacgattgctgttggcacacctaggcgaagagattcgagagaatggaagaaatccctggcattgacgacctccgtgtctaaattcaccatcgaagacaagagcgaggctggtctcacattaccgcagagggccattacttcaccgataagttcgaaatacctggccttatgcacgagaacgacctacaaatctccttgataccacaaatacgaaagaggataaggacgtgagaagagcagaaaacgatctgcaggaaaaccaaaccaaattcaagggtattccgttttcctggaagtcgtcggcatggcgaatctcgccctggtcttaagggatactcctatcattgggagcgttaacggaaaaccgaaaaagccttcaaccattgcctccgaaatcgtgggtggcgagctttaagaatacctccagcatattgaaaatcctattacaaagaaagtcttccggaaaacaggtgcattcctcctcgtcagaggcgcacaaaacagaggttttccgaatcggattctgttaatatggaaccatcacaagcattgcaagaaccataagccgaagcacgggacctccaacagacccgacttttcattggcagtgaatcaaaattgaattccgatgtccgattttgggggaactgttagatcggatcatcagagacccgcgatgctcgctctaccgcattctccaccgcggtcgaagagtctcaactcttcacgccagctgagcgaagaatgggagccgggagccacgggccccgaaaacatccccgacgtcatagggcttcaagacgcaaatggcaaaaccaaactcaaggtggttggagagttaaagataccctgggtcgatgaggatcctctagtgtccactgctaagcaaagtgagcttcgcgcaacctctgcgggatatgcagaaggagttgaccaccccgaacagctttactaccgcatccttgacgccgtccccaggatgccagccaggggcacctacaccccttttcaattcgcagggggcctgttacccacgtgactacatagctatagccccgctactatcatagacaatacatcatctatcttcccctgagctaccagcgtgacagggcctccaggatcatgtttcttcccctgagctactggtggatcatgaaccctcatgatggcaatgcgaagatatgttgggtggccagcaaggcggtcacccagtggagccagatcccactattagatagaccagatagttccgtccttcctcccttgtcctctcctccttgtccatcatcagcaagagctgccggagcatgtcacatgagatcaatctccagcaggaggtgaaaggtactgcacgtgcccgtacagcaacttcattcggaagcggagctggtactaccactagccagtcctacaccccacgtgtgaagcgcgaaggaactacgtcgtcgtccggactgtcagccatagaatgggagaccctgatgaaggagggccgatggttctactgcaaagagaaaggacacatgacgtttgaatgtcctaagaagaaggcgaacgtagcccaacaaaatctactcctgtcttttttcttacgatactatccatctagtagatctctattgatatatgcttacctctctggatcaatcgatatcggtcagaaactaggattgaaaagccggagaggcaaaacaacagggccaatcgctactaggtcaacacacgcattgagccacttcaccttcgagatctataccaaatgagttgcgagatggaatccttcctgataaagtgggaggtaaatgtgttggatctgtacataatattaatacctacctaactacatcactggctacatctgggtacttcttataacaatcctggctgctccgtcaacacatttatggtgtaaacttcactacctcagcccagtttatcttctataaaacggactggagtactcaataatactgtagctaaaaccatagggccaaactacacagctccataaagtaatcaaacattgtttttttaatttttttggtgtcttaaaatgcagtatcaatggaaaggatacaatctgtcccgtttccactccaacccccgagattcatcttcatcactgtctcatcaccacttgtgctttcccttcaattcagttggctgattccagggaaccatttgtttgcccaaggtggatgacgccttgaccatacctgtaccaccctggctgcgaccagtcgatgtgttagcacgcttgtcaagactcgcaggacctctgttccagtacccgacagcatcgatcttctgcaccacggttttggcaagttgtaacattgctccaattcctgaatggccgacttcgcctccgagggtgctcagcttctggtttatatcagagggaaggaccctcctgacatctgcaccgagaagatctgttgcacaccaggactcgttgcgatcaccgggttcaaggaaggaatttgatttcatgatgtcgtccactttgctgctgacaatcgaggcctgccaccactgctttccatccttgaccatcttctcaagcgaggcgttttgcaaaaccgtgatactaggatcaaagacggatggggtggcgaggagttcttggctttcgctgatttggagaaacaagcctttgctctttttcgagcgataagggtgacggctccatcgttccatgaacaccttctcaattctgatctttgacgccggaggagcacggaccagcatacgaagatgtttattgtttggctctacccgaatgcttttcgccatcattcgtgcagcttcgtcaagctccggatcagcccccgtaatgtattcgatgtaaccatgtaccctagcagctgcatcccagacttgtgaagggcaactcaagtgcacagtgcctagggagacctcgggatagcggatcatagcgtgtccatattcattgactgaaataacaatggttctgttcggaccaacgcggcaccagaattcgtactttacgcctcggtggctgtactttcggtcgaacagacgagattggttgacctccaaatcgatgaggtagtcaatatcggcaggagatgtagtcaagcgctcgaagaatgagattggaggcggcgtcaagttattcttagagaagaacagctggtgaacctccctatagctcatctccctctctttggttgaagccggtaggctgggcatgaacataagcccgaactggatttcaaggctcattgctccagggaagctgcgaactgcatcaaggattggttgaagaaaacgaaacaaattctctgttgattcatgcatctgcttcttttctcttgatttcgcagccatcttcatggacaaagcagtgcttttttgtggcagtgcttcttttgcttttgatcctgttcttcgctgccagttattagcaatgggggcttgaacgttttctccgttctctgcattggttgtgctgttttcattcccctccccggcattagcagtgtggacttcaatatctgcccttcccacggcattaatcacttcatccacccattgaaaggatttgccgcaaggccgctgatgatacattgacctctggaattctcttgtctcagtttcatccgagacagcaagcgtttcaatcacttttgcttccgcatattgctcaccatcttcagagttggattgcaaaagattaggcaagcgaggataaagcatctgaggtgagatatcaatgaggtccgggcaaagagatggcacattctcaacccactgaccaacgtgttgacgttgctggatatcaccgtgcggagcactgccacccgagctaaaagacagagctcgaggtacagggtcacaaaggctagcatcaagaggtatcgcaatctcctcaatgctgggaattcttggagtagaattttccttgatttgctggagcaaatattccagtgctacctcatcggccttgctgcggaatccaggggcctgttcatgttcctttccgtcgtccgatgcggcgctcttatgatcagagccagaaacttccaaatcaggcaatggcgcacttgtagcgagccctagttggacaggctcactagtaaaagaggctggagtcgtcgcacggagcagcatcggatctttatttaggtcgggataaagagagaaactctcagttagctgaggctgcatagctgtatcctcgatattgggcatatcgaaaatatcaccagtttcagtaaaattgcgagccttgacatgctgagcatatgtagattgctccggaccacttgatcggactgtggctagcggatcgaacgcaacaatatgttgtaagccactgttgagactgctcacttcacaatcaagatcgatgagggggcttgtgttctccttttctctttcgctgcgatccagctgggtggatgtggtacttggctgcttttgatcccttatcgttggattgttggacacttcgtctattccagtttccctcgtgatcttggtcttctcaagaattagctttatctctcccatcactgaatcaacacttcgcccttgagcctttgtattcacctgtaaattcactggctcgagtgtgccgaaaagctggcccttcttgactcttggagaacgaattggtcggctcagagggctatttagcttctcttctcgattagcgggagagatagccaaatcatgggacgtttcccccggttgtttgggtgctgtgcccggatgagtggataggactgggcgacgaggggtggcatttgagtctgattccctagtagagatagaagccacaggaccggttgcctcagacattgtttccggttgtttggaaactgcatttgaagcagtaaagtcagctgcgctgcggactatactcgccagtcctttttgttgagggactgagatagacgaaccggctacttgttgctcccttattctctctctgtagctgagtctgccaaacagagagatatttgggctatgaggagtgtctggcttttcttgttgagactggttaatgggtacagttccatcttgtagcataatcacgcgtcctttgacgccagcgggattgggcttgaatggaacggactgtctcttctcccgtggggcggaaacgctgggcgcaggttggagcttggatttaacaagcgtaggggaggtcgtatcatcttccagtgatgctcttgtatggatgttgcttgccataggccgtttggtgacaccccgagagatccatttgtcgacgtcttttgccttaccagtcgagagatacgggtgcttagtgtcattcctctcataaagggcctcacctttgggcgcgatatgttgatcaatatcccccagaaagggatcgtttctcgggccgatctctggaaaatgataatcttcccagtctctaataatgctcgctttctgagccacttgcggtggctgacgaagtttgcgaagtggacaatattggttagctgactcgtcgaattcgcagacgaccagagtcattatctttgggagacgaagagaggcatttaagtcgatcaaaatacgccacaaggcagtggtactgatctgtgcatatgtcatgatgcgaaaggtagcgtcctcctgttgtggagtaaagacgatcagtcctcggtttgtgttctcaatgagatcctagaaagtattaacatacaggacttcgaaacaaggactcgggactgtaccaaacattcttcgaggcagtcgagtatatccattgcctcatcaatgttgttcatgtattgtgcagagatacggagccctcgggctccctccactgtgatttgtgttttcgtcattttggaaatgcgaagtagaagagcgtccgagtcatgagagatggggcccgttcccatctgcgagggataccagaatttgacaatgagtccatcgctagtgggttgtgccggggcaatgtcctctactagggtttccgtctctgggagcgcatcgctttcgtggctaggaaagggattggggtcgaagaaggtagagattggaagctgacgaattctcgtcgtcttgggtgaagcagatattaggtcaatataacttagaaattggggaggaatcaagacatacctcgagcagatcatcattgcgatgctcttcaatgtaattcgcaagcagcgatgtgattttgacatcaaattcctcattgaattgacccgtaacaaccaagatctagacacaattagcaaagtcatagcaaatagtacaaataaatagtacagaaaaacctacatgtttatcacgttgatattcgaccttgatcgaagcaccgggattcaatgctctatgagaagtcagttttgatcaagataatatacatgaatagtatgcgtacttgagtttgtctcggatttctgggatctatatcgagtccggtcagtcctagtcatacagaatgatgatcatgagatgttaaagtgtagacttactccttggtcctccagtgaccacattgaagtcaaatgaagtgtccggctattagccattttggacggtgtttgagagatatgcggagttgaatgtattgacgtgggatggatgtgaagcgattggagaccgacgtcaggtgaacggatccaatgacccggagacggaaggttttgggccttcaatctatttgaagacgttaattgggttgaaaggggaatgaaagaagcaacccagcaagcagtgggttgattggacccaagagaagacaatcaattaagtaagaggtaggtgaaggcaagtcgagtagagaagaacaagatgagcctcacctagataatcgatttgatagaacaggctgtcatgaacggtgcacatgagatgaagataacggacgaaagacgaggaagagagaagagagaggaagatgatgagagtcaaatgaatatgatttctattattcagcgacgatggaaggaacaaccgcgtatatcaaacttggaagtcagtagcaagtgacggaatgtgaacgcgcgcagtgctatcttgtatccaggacgatgagattggagtatagcaattcaggaatatgcggagtgaatacatagggcaagttaagtaaagttgaaagagtataaatttctgagtcaagcgtaataaaatgcccataacatctaggcagaaaggaaatatgcagccactctttaaaagccctttgaacacaagcaagaaacaagacttgccatgttcaccacggtgtaatcatgtccaggtaaaaatatgcaggtcgtcaaacgccatatctaacaagggggtaacagtacaacaggaaaagggtgaaaatgcagagtaagaatacaggaatacaaaaatcgaagggcacacgaccggaattgaactctgccacgggtatctgctgcaaattgaaatgaaacgccatgcaccggccaagaatggtctatgagaaatgaacaagagtggtaggatggttgtcaagacgggagttgggacgggaaaagtattgtccggcatcaattcggtggtagattttgaggaatctgagcagtaaacagagagaagagggggtggagagagatacttcgcatgattgaggtctggggttgacacaaacaagagacaacacgaattattcgccgctttgttcgctgctttgtcgacttgcattgagccggattgcccatttcatttctgtctcggtctccttgagctgagcaagaaccccagcgaccatattattgctggccttggccgactcaattgtctcgcggaagtcgttatccttcaattccttatatgcggagtgttgggcgagcagcttgtcataagattccttgagggagtcgaattccctgttcttctgatctgcaagaacctccagcctctcggtggagagtatatgtgtcttctgcgcgttggcgagagtcgtgaactcggcccatatggcattaatgcgttttgcaaactccgccttgtcgcgtttcaaagtgccggacaatacatcgtactgtgtctcgtagtgtttggcgatctctagtgaccgggcttgttctcgattgtgattctcgcgctcctcctgcatagtatggttggtctggtttgagttcatttccgcgtcctgacgcttggtgcgctcgtgctgcagctctattctcatttcctccagcttccggtctttccgtgcaattgagttgaggttggtctcgttgacttgctcgaggtttcgtagacgctcgttcatgttttgctgctggatcttgtaggcctcattggttctctggtactcctccgagcgggacttgtagagtgtgcattcacgcgttaaccgtgctatttcttcctggagattgtggatcacacgtccggatttccctgtcgctgcatggccaaccgctgaccattctgatgtgtgggaatcgccattgctcgtgtcgacggaggtagcggatgggtttggagggttcgaatgagacgagagggattggttatagtcacctgcagggtggagattgtaagcttggaaggtagagggagtgggtttggaatcaccaaccattctggccttcggtggctggttcgtcgtcgaggagtccgttatgctggtgcatattcaattgcgtgtccacatgcgggagattgacttgtggcgcttctgcacggataggggggtcagcagcaatcggcatgagatttttgctagggctgagacgcttcatgacccgtttgaagccccccatggtgaccacccgcgcctgtcatgaggaaccagatgggaagagcaagatgggagcaaaaagtagtgagcctgtgaagggaaaggcgcataccagtattagaagtcaattgagcaagatgtgaggtcgttgtcttatggtgttgcttattcatctagacatcgcaaggagtgcctctgatcgataaaggcgctgtctcatgagatcttcaaagatcatcaaagatcactaaaacaaatgatctcagcagaataatccaaaacaatgaagtagcggtaaagggttgaagaagtgggagatcagtcgatcatcgttctttgtgttccaactccgcgtccgtcagggagcgccacggcgctagcggcgagcgacaggtcttgttttcttttctttgctttttcttgcctttctttttgtttgtgacgcattgaatatgctaaatgtgaattgattacttcctcaatgccttaggccacctatatatcaacgatatctgatatccaggggtattttatgtacaggaagttataccattttgttttcgaactccaccaaaacaccgaagataagaccgacaacgccaaaacagatgattgacctagacaaggcaggccaaaagaccggcaatacccatcaccaattgcacggagtattgtgggatagaagcagcaccagtctgcacgcttccggttgaggatgcttttttaccatcgacaacctcggtgctggtagccatcggcttatcggttgagctgacgtgagaagagctagaagggctgcctgatgagttgacagcagagttgatgagggccttgctggcagtgctagtcattgtggtgtgggttccatgcgttgtttcggtagtaccagtggtctgggtgttaggggcatcagtggtctgggcagtggtaccagtactagtgccagtagtgttttcggtgccagtggtggtgccagaagtaccagtggaggtatcagtagcaccagtagaggtaccggtggctgcagcagtagaagtagcagtgccagtttcggtggtatccttagcctcgggaatatcggccgcgggcttgccggccgacttaagcagagcggtatagttagtctggtctttctgcaagatttggaaggcataggtgtcgcccgatttgacatcgttgtcaggagtccaggtgaaggtgccgccctttccatcggtagtgattggcttgacatcctgcagatcgcccgaggaaccttggcggaggaggatggtcacaggctaaacggggtcagatttgttatgagacattggaaaagatgcgtattacctgaccaggagtcgcaccagtccatgtgagggtgaccggcttgccaggttggagaggctccttgggccaggaagtgaaggatagagggtcggcagcgagaccaagggacacgaaggaagccgtcacggcaataacacccttggagaaatacattgtgataaaagaaagtcaatagttggttggactttaaggaaagtaaggtagttagaagattgtgttgtattcgtgacctgggtgagccggtgacggagaacgcgatacaacttcaagaactggcgcatcgcgattcttaactggcggcaagaattgcccagatcccctccagccccgtaggagtgagctcgaaagtcgcctgttggtattccgctgagaccccaggggcgttttggagaatgttgcattccgatagccctaacagcgaagcatcaatacgttacctaaggaagcatgtctctaccttggctggggaatgcctactagtaagaattggaaattctcgagacgaagatagttcaaaacttgcctaggggagattgatcagtcattatggtgggagggctatcctgtatctttgatcgtactaactaggtggccgcgagatggcttcatttttctaatagttgccgaaagtccacaagaatggttcgaccgtacaatgaaagactcataactcatcgatgagaagacccaagtatggtagcccaatagcacgactcctcgcgacatgctggaatgctatccctttccgggttgttttggtggggatcagtctatagggctgcggcgaacatcaagatcatttctggtgtctataaagcatttcttaggtcttgttatactatggatctcataccaaggggtgccatatggtgtggtgcaatctaaggctggggtagcttgatcgccatctatacagcacgaggaataccaagtatttccccagccttccaacccaatgacccagttctagagatattgcaaggcctaaactcatatgggataggaaataagattagcaataacaataatggtacggggttgaatcgagttgatagagtaatgtatacaaccgtgctgcggaactcaagaatatatctctcatacgtgcaacatatgctatgtctcagtgccactctagcctagcctatactagtggttacagagcaataatgggcccaaaatatgtcaagtacgttggctttcttcaaattgccagttgaagttccagtcttgtgatcattaccgaagcatataccttcaagcgttggtcagtctaggtttagacttgcagcaagggatctgttgctagacgatcatttctcttccaggcagggaactacaactataccccgcaatctaagcccttgagcagagttcattgttaaacaaattgaattggtatacgctgatatatgaacctcagaactcccacaaatcccgcatgaaacaccctggaccagagtccacaccaccatcttcctctagtagacgatctgtgaagatacgcttgggaatcatatactcgacgacaggaatcttcttgagatttctctcttccactccaaggtctgcagtcaccatgcccgcgtacgtgtgatcaaggaaatcctccagactgtatgattgctttgtgaactgctcggaaatgatccgtgcaatggccgcaacgttggggtggaagtgagattggagcgtctcgatctcccaaagactgctctcaatggcgttggtcatgttggggtcgggctcgtttggatcgaacggatcgtccatgccttctttttccacctccgcaaggagatccttatcccgaatagatcggtgcatcatgaatgtggtcgtggggtgttccttgaaaaagttgtacatgaacggaacaatcaccacaatggcggagggaggggcattcaatgcaagacgagcgagacgcttgatgaagctggcgactaatgtggacggaagatgggttgaggacaagaaggtgttcagcagtcggaagaatcgtgatctgtgcttcgagtgcagcagctcggaatcgaggagagagtacagcttggcgtagaattgagggtagtccaggttcttttcctggatcaggtagaagagaccggaaagtgcgaggagggatgtcgcaccaccgacattgtatgagtcggtcaagaagtccatcagcagttccggtcggttgaaccaaggttcgatgttatgcaccatcatacgtaggaggtttttgcgctgcgattgcgagaggttgtttcgtagaatggccagccatgcctcctgcgcctgcttcctgtgggagtttgccgaaactaggcgcttattcttggtatctcgtttcgcgtagaagttttcgaacttgtgttccggtccaggaacctcgtcgcaggcctgaaggatcttaatcaggatttcaaggacttcgggggatcgtttcgtagaggcataatcactgatacaagttagcccaagactcgactgcgaagaatatatacatacgccatctgtgtgaaagtgtgatatctcacatcctcgtactccttcacaaacttggtgatggcttcggactgcagatcctggccgttgtgggcctcaatgatggccgcaaagatatctttgaagaaacccgtcgaccaaacattattctcagcacctgggatatgggcgagacgttccttgacaatgcgcatgctcagtgccagagcagcaatctagatcatcagtaatagtaaccccgccagatcagagcacacatacctgggaggaagcatctgcctcgcgcataatagccacaagagcattctgataatcaaggcaacgctccttcaaccatgccacaactattttctcgttctcggccgcacggctcgactcggtcaaatttcctccggcgatcaatcgactgaacacacggcaaagagagacggccacagccatctctggtttctcggcgttgttctcgacattgagcatggagagaagggtcgcaatattgttgtagccctttcgcgactccgcaatttgattctctagctcttgaatagtagacagtttctcggcgaaattgtcctcggcgacagcgcggcgcttggaggatgggccgctggcatttttgccgctcttgcgctttttagagctcgaatccgtaacaagtgcaggcattttgggcaggcgtcttgtaatgccgtgaatagtttatctgcaacttttttttatcgttcagaccatctcggatgctggtttttccgaggaacggaactatcgcccgaaacggctagcgtcttcacctcctagccatcccgaacctcaagtctcctcaattccgttcacccaccccatagaccaagattcttccatctgcaacaatggcttcgcgtcttgctaagagcgccattggtacgctttttacgaacctcgaccgtctgatcgactcaatgccttcagttactaacgcaccctaggcgcatcccgacttcggccggctctttccgtccgtggtgtccctgccgtcactgccaacctgacctcctctcgtcaggcctccaacgttcccgccgaggagcccgcgaagaaggcgcagtctattctgaatgccatccccggcaactccctgatcagcaagaccgccaccttgtctgccgtcgccggtctgtccatcgccgccatcagcaacgagctgtacgtcatgaacgaggagaccgtcgctgctttctgtttgctttctgtcttcaccgcagtcggcaagtacggtggtcccgcttaccgcgagtgggccgagggtcaggtccagaagcacaaggacatcctgaacgctgcccgtgccgaccacaccaacgctgttcagcagcgtattgacaacgtcgcccagatgtctggcgttgtcgaggttaccaagcagctgttcgctgtttccaaggtagggatactcggtcacgtatgttgatacttgggtcggtgttgacaatccgtttcaggaaaccgcccagctcgaggccaaggcctacgagctcgagcagcgcactgccctcgctgatgaggccaagtcggtcctcgagtcgtgggtgcgttacgagaaccaggtcaagcagcgccagcagcaggagcttgcccagtccgttattgccaagatccacaaggagcttgagaaccccaaggttctccagcagatcctccagcagagcgttgctgatgttgagcgtgagtaatccactaccgactttaaggaggagtgctaactattctcaggcatcatggcgtccaaggccctgtaaatgggctcactgcattcggcattgtgtacaaaactataagggctatttgcatgccgagttagaccttgcaataccattttgattctttctatattcggacacgtgcttcaagacatgttatgaagcgagtggggcttgaaatgcccagctgatgcccagcatatgaatctgttttggcctttcatcgtagaacaccttgaccagaatatgaaatcagtgcccttttaatgtatgtgactagtaccacttcagagtctacgtagtatatacttgcaagcaaacactggccatttatttaccgaggcaaggctgagtccatgcgcccaaggtggctctatgcaggtctaatgcagcgccaccaccggggccgtggagaatgcgataagagatctatactacgatttcgtatagttggaaaattcgcaaatatcgctaggacatctaagtatttcaagtatctaatattccataattccattgtgtgcacacgggatattagccgctggccaagaccccggcccccgtcaccagcccgtgtaagccggcatacacagccactgttcattcattgtggttatttttcatatcattcatcctcagtcctacaagtattcctgtaaatacttctctcccacctgaccccacacaagaagacccaagtccactcccggcgccatccgacaagtagatgcgccatgccctcactacgtaacatcctccacaaacacgacgatctcagcaccacccaaacacctcgaaatgcaccagcaaacccagcccctgagttgaagctcatccgtacagacacccatacccgagagataatcgtacctccatcgtacccagacgacccaaccccatacccatcctcaccatctcaagaggagcccacatctccacgccggagcttccagttctttaaccgctcccccagacggccctctgtttcctcgcagtcccctccccatcgcgagcgccacctctcaagcttcctacatcaccatcgcagtcgcagtaactcgcgtgactcgtccgctaatatccccgcggacctaccgcagatcgaggaggatcgcggcgcgagtaagcaggagcgcgaggcgctgtgggagaagagggctactgtgcttgtgcagcacaacccgcagtttgcgcactccggttcgtctttgccggtgcggcagggcgagggagaagcttcgctgggtttagggttggggcaaggggggcaggttgggtcgaggagctcaagtcagagtcgggttggtgtggatccaaatcaggatgtaggtggtgttgcttatatatttgcgtgatggttgtcgttgtcgttggaatgtggggctgacgaattatagattaatattcaagaggcgatccgactgcacgaatctggtggtgagttttgctttaatctgcagttggggatatacattaacattgaatatagatctcgagcgatcaactcacatgttcgaacaacttgctgatccaaatggcgcaaataatcctctgagtcaggttctttatggcctcgcgctacggtaatcacgccccctatttctcaattcatagatgctaatgtgtctagacacggatggggctgtcctgtagatgcaacacgcgccgtgacctatctctccgccgcagcatccaattccgccgcggttgaggcggaggctctgcgtgccggagttaagaaagggggagttgcgaaaggcgagctcgttttggctatcttcgaactggccaattgcttccgccaggggtggggtatagcgaaggatcctgctgctgctagacagtattacgagaccgctgcaaatttgggtgacactgatgcaatgaacgaagcgggatggtgttatctcgagggatttggggggaagaaagacaaggtatgtgtgatttccacttagatatgtattctgtgtgtgcctattctgactcgatgtggctatagttcaaagcggctaagtattaccgacttgccgaggagaatgggtgccctactcttgggaattcatggtatgtgcaactgactgcgatatggagtttgaatctaatggatactataggatctggaaagacaagtacaacccgaagtaatccgctacaacaaaggtagctatcattagctctttactacgacggaggtgattattatcacctctatctacgattcatgtgctttacggtcttattgcttgatgtatctttaacttctacgtgtcacgtcaaacattcatggtcgatgtccaaattgaacataatctaaaaccatcacgatgtccatagtcacgggtggatctgtccgcgggaactaagcctgatttgggctagtctgctccatagaaggggaacctcagctcctttcttcaacttacacatatcccatctacttcttgatcttctatatggaagctgagacatcttttagtgcatttctcgaaacatgtgctgacggaggtctctaagcacctaagaacccatctttagtagtggattaactactgagaacctagctaaatcaaaacgtatctcctgaggtgcagaatctttgaaccgagttcagaatgtttcggcacgaggagtgcaacaattcctcttctagtctcagcatgatggttacgcagcttgcagccgccttcctctcatcctagtgaaaggagtcatctccaaatacacgcatacttccagtatgttccatcttgctcattctttactttactgaaagtactgattatctcttagacagattgatgcactaaggtattgtaagtaagtaatttgtcatgtctctctttgcccctctgcagcctttgttcttttgtcccacaaagctatatagttggcttcatggccgggatagcacttatcacgaacgatgagcggtctcgcatattgagcaacctttcattatatattgatatcctatatatacctaggcaaccaggcaaatatcatatatccttagagtcattgaagaatgctccaggaaatcgtcaggaagagggagtaccctatcaggtgtgactatctgaaggtttgttagatcttctcttcctagtttctagaagagctaagcgagctggtcacgagtttgcagggtttgcgtggaaacgtataaaaccctgcaaacagttcctcctttctctttcctttccttctctcttcttatacttactgttctgattgaactggcatgtaacatcaaccgacttcacggcagagcataccttgcacttgctggtgatattacagattatcgtggatgtccccggataggacatgatttcgaggccaagatggcctatcatggtcctgggttattctttccatcgatatcacatattgagctccgtcaaatctcggttcaccattatcctacctttgtcgaacaacctctgcacgttgatcattccagtttcactttgctctcaccaaccagttaagtcaggctctagtacgcgctacttttggctgtatactgactatccgatcatctctaggacctctatatagccaaccaaatcggcatcgcgagctcgtccatgtgggtgacgagcagtgactttgggcctcttccaacaatcagatggggcagcttacaagtcatgtttacattatacccgagcctggaagcgtggtgcttcgacctgtcttatctaagacaatggctgcagcaagaaggttttaccgatgcccggaattgagaatgtctgcttgctcctccaagagttccgcaccaacgtgagaagggtgattggtaagggtggtcagaaacaaaagttgacgcacacagccccgaatgtgccagaaatgagaatgccagctgtttcgcagccaactcagaccaccttggagtccaccgagtctgttgcgaccgagcaggtgtctacacaagcagtcatgagtgagccaactgtttctcagccaactcagactgttctggagtacacccagactgtctcaaccgagcaggtgcccaccgagacagctatgagtgtgtcagctgttcccgaggagttttatcacgatacggacgaacatcaataaaccaatctcctcgtcgaaacgaagaggtccagagcgcatgagcccggccatgcaagaattcgcagaggtggttgcatggctgaagagtgatctcgccaaccacactagtaggagtgccatttccttaactagaggctggcaagtgctaacattataatgtataggcgccgttttgttattccgtgcggcctccagccatcttacatctcctatttgaaatagccgcaaatgctatcagtttggcatcgttgcaacctgcttcacatcggtgctgctattgttattctatcagcgcggctttggcgtaccatgtgtggaagaggaacctgacgaacctaaatattccgatgagccagctaggctctgagctgagcagtcatttctgattacgatcaggggccccaaattatacctgtgatagttcgttgctccaaaccgtgcgataccttctccattcactctttatctttcaccatgggaggcttcatgatacctgcctacacttgctgttcgctttcagaatccaactatcagtgcttggcatgtataagatcgggtatattggttgggctgcatcggtattcgcacgctcgtccctggcatggtgagtttttcgatattcatgctctggtactattttctcacatgctcatagggtaaatgccggccgtgtctcttcgtgtcccaggatatggcacttcctcgcctactggtgctataaggactgattcctatgcactaggcgatacggcacccaacatgcatcctgggaccgttcagttgactattccccttaaatctagcttagagatacagcttcctaagtctaagatttacccagttggtcctagggaccgtgaggttattaacgccgcctttcaaccgttacatgaccaaggaaagatgagctatataacgggacatactactacgggtttccctgtctttattatatagtatacgactcaccggcccaggcgcgaacccgcgtttaagtttttctaccaatggtacgtccgacgcgaacatcgcggccggatatgcgtcgtttcgcatcggggccaggaaatgttcatatcgctatcatgggtttctgcaatagcgtaccctacgttcagcggcaaatggacctactcttgaaagagtttgtggagttctgccgtgcgtacctcgaaaatcgggattggggcaagaaaggaggtgttcgagaaactcctgtcattttggggaaggattaagccctactattgattcgttttttggagggaaaggtgaaggaagcgatgctattcaaaaacgttgaaaagacctcctgtaggcacaagacattccgaatacaaaatagataacactgtcgaaagcatagtttcgaatttagaataaatcaaccatatagaaccagcctgcttagtttttgagcatagtcacgtacaagatgcgccaatatagaagccaactttgcttcactagctcagtgtcttgactacaccggtattcttctcattggagaagtaatcgagccgggccagatcctaccggactctcgggcatctgcttctctgctcagcctgtgcatgcatacggtcggcatttcatccaattaccgggcagactcggcagcctactgatagtggcggtgaattgcaggcccgcatctccccaggttggccatgcatgaagcatattcagactatatcctaatctcaagccagtgatagacccgctagtctcattcctgctagtacccgctttccggggtcaaattgctctgacggttttaagcttggaacgaaccagaacaatgattgtttgaaacgaaggttgatttactacagctagagattcaactgacccgaggattaggatgtgcggaatagttaatggagatgaggatagtctgttatactaggatctctgtgcgtcaagctgtccatgcaggatcgatcaaaaccaagtttctatcctcgagcaagccatcgaggagataatatgccgatgcagctgtgatatgaatatctaatattagccaaacactttagactcctatagaacggtgtatatttcctatcttggacgctaagaccgggaccatgatgttccggtcacatttgaccaaacaagtcaagtcgaccatatcaatgtctgttgcttacggagcacacgctgtcttattttgtcatgcaaatgttgtccatctcctcaattcaaaagcctccgcggtaataataacatcaatatcacgaccccagccccagccccttagacccaccacagtatatcccttcccatctcggccgcccacgcaagctcaatgtgtcaccgccaagccaacaaacaacataaacctcagcggctgcaccaccccttacaagtgcaatgcgaagtataatgcgaagcggctggtgacattgccagccgcttactagcagctctattcaagtcacatcggggcccagattcttgtgtctgtcctaacgagtcaagttgcacaggtctgcttgatctcactatcaatgacctcactcagtgtagccttgtggatatttgtctacattaatataacaggaggcaaaacagcccctccgggtcatcttaaatcttaactagtagaacatcatcggagtatagtagctactcggaggctacgtcgcgagcaatccgaatgacaagactctccagccctcatccatccaatcagtgcagatcaatcccacagctacccctgtagatcccccaatggccctgtttcaggcgagaacatgatagatcttcgcgctggtgcgtggcttgtgtcattggtactccacgcccgagccaactaaccaggtataagacattgacggcgcctgattgatatacattcgacttaattttgctttcgttgtgatattaaatacccattcaatcttcaatcttcactttcatttttacttttaacttttagcttgagtacttactgctattctcacgtatgttcgttctgtcttatcttacaccgtttcttgcccttgcgtccgtctaaagcatactgttctattattatactcggctcggtcgctaatttatttgatcttgtcttactccagatccatttctgaatcttccaacttcacaatacgaaatgcgcgcttcagttatcatcctcggcttcctcgctactcttaccgtcgcgctgcctgaagcataccccaaggctgcgatcgcgtgtcaatcggtgagtcttcaatagcaatatggcaaatacagacaattcctaatgttattaggataccatggtctgcatagctgcgaactgtgccgctgagggatgttgctgtgagggacttacgtgcggatctaatggggtaagtacatagctaccgagcttgatggattatcgagcgtgatttgttgattcaatgctaatgaatgatagacttgcacgccactataagatgttttggagttacaatctgataaagggatgggcgcaaccacgcctttttgagttggcatgagaatgcgactgtgctcaatgctctcacttgtatttatctatttgttaatagtatataattcgaatcaaagattctcaatcctcattgctagtcccatataacataaaacaggagtggtagctttagtcgatgcatctatcgtcctcatggctcagacttagaatggcacatcactcgtgaagattcaaacgaaaccaacaaaccctcggcaaacattccacagacgagagccccatcttcgaccatatctcaaacccaatccccacagcaagtaatccaagccccactcaattcatttcaactccccagcctcaagccggcgttgcacacggcgccagggccgagtctcatcatcatctcgtttccttttcgtctgatcttcattggcactcagctgtctgcctctaacaagaaacccaaccgaagcgcccactatcacaaccgccaaaagtaggatgataatagcggctgcggctggtagcagaaagtagtagaatagcttgataccaccgatgacgaggatcatggttacccatattgggcgcaggaggatgggccattcgttgaaggctgagccgaagaggtcttcgcctatttgttccattttggtatatggtgagatagtgaaggcggtttgatttttttggtttggatttggttgtctcgttcgagatagaaaggagaggagtatggtaacagctcagcatggagaaagatgaagtctttagtcgacgcctgaacttgtcgttgtcgttgtcgtccgttcaaggctggaaagaacccggtccaggaaagtcaggacccagatggccgctttcctattcgggaagtatagctttttcactacctaaccagaaccagaaccaggtacgtaggtgttactctgcaccacatccgcagaattatctcccaaatgcatttccttcaaagcatccaacctcctcctcctagcaagaaccatctcggcaagaagctcaatctcgatctcgagacgcttttctaggtcgatggtatcaccggggatattcccagctaccgggggagcagtaatttgttccgcatctgactccctctgttcccgctccttcttctccttctccttctccttttctcgcttcgctttactctcctcagagttcatatcccatccaaatagtgcggcgagtatagcgaagaggaggaaggcgagaatgaagattatggctattgccacggttaccgggatgaggaagtagattaatgttttgaagaatccgctgatgatggatgttgttattaggagcgggcgcatgtagaagggttcgcattcgaatgggaattggcatggcatggtggatttgggttgttttggtttttgttcggcacggaaggaagagtggtagtaagtttgttctgagggtttgtggtaaatggatgatatttctcatatcctcttctgacttggtttgggctgtatgatatgcactgccccaattgtcgggcgcggttgcatgatgtcagtgcacgacgtgttgcatgacaagccgaggtctgaatggaggaaagggtggcagggcagatgaagacaaggatatcaagtgttgagatcgacagaaatacactacatatttcctacactacagaattaccagatcaaaactcgtaagaaggcataaatgcaatatacacaggactaataacaataaacagcaaagagatcaggtgcaaggtcagtagacaacgtcaaataaaagatgtatctaccagagtcaagtttaaaataaaatccaagaaaggaagaaagggccgatcgtcgtccgtagacacaccaagccgagaaagggaaaactcctagtcctcctgtacaagttcgtgtgaactaaaacaaaattcaaaaatccatcagagacatggcgcttagaagacggaagagcaaccccagtgctgctcaacgttgaactcgccggcgctcttccaggtgtcgtcagagaaggagaagaagatggacttggagccgacgctggcggcgatggacttgatggcagtggcctgctcagagacaccggggacggcggcgccgttggagtcaccggcgttgggccagccggtctcgaggttgatgacgtcctttccaccgcagatctcctcgagctcctcgaactcgctcttggtgaactcaccggcctgggcggcggtgacatcggcgttgaagaaggggtggatgttggcaccgacgatgtcgacggcgctgcagagagtggcagagccgtactgctgccagacgttgatgggctcggtggtggtgaccagaccggtgtagccggcggccttgaagctagcggcggaggactcgatgaaggaggccagggtggcagcgtcgacgtatccggactggatggcctcgttaccgacaacgatcagctcgaccatggaccactcggcccaggcgatgatctcggtgacctgctccttggcggcggagacaccggagccgtcaatgtagacacccatgatgatgttgatgccgagggacttgcaggcctcgccgatgtactccagaccgctgcagtcagtggagtagacacggaccaggttgaagcccttgctcttgatggtggtgaggtcggagagaacggcggccttggtcttgcagtcaccagcggcggtgtagggggagtaagtcataccgtactggccctcaccgaggacggtggggacaccagtggccttggcggtggaggaggaggaggcagagctggaggtggagctggaggagctgacaacggaagcagtgctcatgctgacgggaacaacaggagcgacagtgctggtgctgacgacggggacggcagtggtagcggcagcggcagtggtaggcacaacggcggcggtggtcgaggccagggtgttggtggcagcagggcagatgtaggtgtaatcagtgcgggtcacggtgacggtggtctcatcctgagtgtaggtaccggggacaatggtctggggggtagggtagaccagaacggtgctggtaggcacagaggtggtggtagggggcacaatggtgtaggtaccagccgaggggcagatgtaggtggtggtctcaatcacgctggtcacggtgctgccggagggcttgacggtggcataggggcaggtgactgtagtggcagtctcgacaatggtggtaacaccaccgtaggtgacggtaccgctggggacctcagtggaggtggcaccgcagacggtggtggtgtcccagacggtgatggtggtggccgggatggtgtagacaccagtggtggagaaggtgctcacaccgggagtgggcagcacaacggcaggggtgctagcgacgctggaggtagcgaaggtgctaacagctggcaccgaggacgaagcagactctgcgccaacaccagagacggtgacggtcaaagtgctggtgctggtggattgcacagtgctggtgtgagtgctggtctcggggatagcgatgggagtagaggaggaagagggaatagcaacagtctcagcagggaccgaggaagtagcgggaacaacagactcgtcgaccagggtagcggagccgtagacggtgataaccttggtggtgcaaccacaggtctgctcggcctcagcaggggcagaggaccaggcgctgacagcagcctcgcgacgctggtggaaagcatcatggcgacggtgaacgccatcggccatggcagacccgaccaaggcggcggcgaaaatagctcccttcattatggatggataatacagccacgcaaaaagaatgaatgcccgctgaacgagtgaagcggtggtcaatagaatcgaaacgtggatgagaaggtgaaaagagagtgatgggggggcaagcaaggccttttgatggagaaatggttaccgggggagagttagggggaagggaaaaggagaaagaatacagaggtatacacgcagatacacgcacatacacacgtacagctccaccgatcgtgaattggcaatttaatttcctcgaattacccctggccgagtctagatgtgattagattgaggtgattggtttgtttaggtattggtataacatacatctaacttacatatgcaggtactataaacagtcagatcgttatattctcgcccaacggttacaacatatccagtgtctatgtttatgtctattctatgtctattctatgtctctaactattctatattctacgtcccgtattcgtattactattattatccagcacggatcatacatcgccctccccttttcatctaagccttcggccccagcgtcgaaaacagtgtctcacacccagaatagtcttctccttaccgctgtgagggtccaacttcctttggccacattataccgggtttcatatatctgcccgatcatgcaaggccttgtaccctgtggctttatcttgctggcaagcccgagccctccacgatccaagaattagggcatctggaattctcaattggcagattaaaaccccaaacccaaagaaaacagaaaagtctcttcccgcgccatgtggggccaactgtcatagcgtccccggccagtcccagaaaggaaaggtggcagctaaattggggtcggtgctggaccctgattggctgtggtactacatctaatttccgccctgccgatctttaccaccaaaaccaccgtaccggtattattaatcttacgattaccggccagatacagtgtatattattgctttttcctaattcggactccgttgtctcggattacacggagtcgacgaagattctcgaatgtcttatactctccatacctatactaatacaactactcatcctcatcctcttggaaaacacatgcgctgtaattgcgctggcccccctgtcgatctccaacgatatacacactcatgaacaggccgatcacccggtctaaccaaagtcaaaaacagatgataaacggggcaggaagcttgaattgctctattaatgagtcgcgccgaataggaaggaccggtcaacgagccaccttctattcagagcatagcccttgtctagtgggatcgtggaatcaagaaataacactgtagcctgatccgaggcaaccgatatcttaggatgtacgcgtacaatcaagcagtaggcatgttgtagctatatgttgtatagcgacaatcctaccatccctgtactgagtgttgaccacaaggaggacgaggttggatcctcgatctcttcgactggcgatcacgactcggggtagatcacacggatggggacaaagggtgtcggagattaccgtattctatagatacgtagcgtgactgatttaattgcactcactaaatagtctgatctatctatgttgtagctgatttatggatgttactattgactcaagagttgggcaactagaatgatgttaaccctgtattgtatcgcctctgccacgtttagtccatacacaaaacaacaaaacaactcaagccaactcaacgatccagaccgccagaatcttggccaactgacaattccaatgataaatgaaggccaagataatagcggatctgggcgtgggcaatttactttaggtcaaggcttggcaataccctggttgaggttattcagggggcttccaggggtcggcgtgcggccgaggactgcgattcgtgcagagactggggtggcggttctcgactccgttcagccttgttattggttttctgtttctgtttcatatagaacgttccaaggtctagagtaacggtgtgggtttatgttccggggaagtttctgctttttggttttccctgcatatgacttgtttcttttgggacgtgtcggattagggctatttattttacgctggcattccggatgttctatacaggccacatgggatggcgtttggaatgtgtcgctttatctttatttctaggtcatttcattatctgatgtggtttctatcaacggcttaatcccgagttcagaatatatttgtttgcactttgaagtaattgacatattccgtatgccttgcaggatatatatctcagaacatcaagaaatgacaccatgatcagggtccacagggtccaatatccttgccagaataaaccataggcaacctgaatgtatttgactcaaactcaggctctttcgggccttccagtcacttttgtccgtctctcgtacgagaagcgaaggagggggaggaagataatcgtgtttctgttctacattctttcttagacaagtgtcgcttgtatctagattgcctatcacctacctcatctttgagatgtacgtcgacttcgtatggacaatttgcatggaataatagacgtcgaggtacaggggtcgatagaagaatgacatattagaaagtggctagatttgggagaggagtttggggaatataataaactgacgtcttcaagggctaacctgctaagatgttctcaaccattcattgtacttgtgggcagtgtgtctgagcgatgtgctacatattgattcgtagcgtggaaggttgtctcggtcgtagagaagcccgaaggggtaggatgcatagatgcatagaggaatcaacggcgatagtaaagaagatagaacattgtgtgcatagcgttgtcatatgctaggaatatacggagtagagtgagtgctctaaatatgtatctggtgtactcggtaggtcccgaagtgaacctggatgtacatcacaacaacagtacatccaaaataaagagataagactgtcacacaaaacgaaaagtaacacaatgcaagacgtagatatctgagtcttgttaaatcagagcaaagatagaaaaggcagaacttgtcgctgccgaatctgaccatcaccgtgccacccgatcatgccacacaccgtaccacctcaccaccaccatcatcaccaccaccaccatcaccagtatcttccaatcatccgacctcgaataataatcggcagtgcactctccacaaatcctaattttaaccccagaaacaggaacggagaaacccgcctaatacatcgcaccacatccgacgtcacgactcccaaccaaccacagccagggttatcccggataaactcactcccagggaaaggtcacgctatacagaacatgccccaggaacggcgaacggccagtcccgccatccagcctctcggaaccgtgacggtttgatgctgtcaggccacttgctgtggctttgcatgatgagatgggagaggtggcaggatgtatataaggctggatgttacacgagtttacctattcttcatcacacaagacattccattcatacattacctacttcggttaccttgatacttgatacttgacttctatacatctatctacatctacatccatctacaacagccaccatgcaaccaaccgaccaaaccaagacaaaggccaagacagccgctgccaaagccaaagccgctgaaagcgagcacgcccgtctgcagaatgactacggcgcagactactgggtccgcaatggccaagagcatcgagtatgtacaccactaccaccgccactaccaattccgatccattgctaacatccaaaagcgtgctactggtggacgaggcctcttcgccggtctacaagacgtgaagcactacaacgtcgaccacggctgggctcgtcgcaagtctgagactgagcagcctgggattctggggtctatttggagtcggtatgttttacttcttgtctatatttgggtttgggttggggttagtgctgactttattgataggatcactggactttgatttggactcgctttgctggttccgtttgattcgattctagactttgtcttttctgacatagactaaaaggggattgggttaagattgagatgattgatgtttgcttttggagttggattttttgattctgtttgtttgagcattgttttgttttatactatatctttcttgatataggagttctggtggaagagctggtttctttaatttctttttgatatgtttatgctcttatacatatcgtgtttggatatatttaatatatcctatagacaatgacatgcaataagcttattcgatataatggttccttctggtctatgtaagcgagtaagcagaaatgcaatcaattgtacattagtaaatatacactcgagatcaacagtcaatactctagaaataccataacggtctacatccatgatcacaggaaaacgtaatattccaagtactatatatatacataaccgctaatagatataccaaacgccctcctagcgtctcaattttagaaatgaggtatcaacacaaccaatctactcccaagagtcaatcttcatggtacccttctcctgcagattcttgtgcatgttgaaagcctggaagagcatatgaggctcatgacccatacccttacgcagacactcgaactccgcacggtcaaggtaatccgtcaggataggagtgtagtcagggtgcgagcagtgcttgatgataacacgggcacgctcacgaggagacaaaccacgaacatcagcaagaccctgctcggtcacgataacgtcaagatcgtgctcggtctggtcgatgtgcgtggcgaacggaacgatacagctgacaccggtgggatcggtcttggtgggacgcgcggacggggtgtgcatgatactgtacttggagttgcgcaggaaatcggcggagccgccgaggccgttgagcatgcgcgagcccatcacgcaggtgctgttggcgtgcgcgtagatgtcgacttcgacgggcgtgttcatgccgatgcagccgagacgacggatgatctcgggggagttggagacttgctgcgagcgcaggaggatcttgggcgcgtagcggtcccagttggcgtagaagcgcttgaagccgtcgggggacaggcggatggaggtcgcggtggcgaagtcgaggttgccgctatcgaagaggtcgaggaaggcatcttgcaggacttcggtccacacggttaggttcttgaagtcagcgccgcccttgctgagaccgcctacgacggcgttggcgatgttgccgatgccggactggatggggagcaggttggttgggagacggccgtgcttgacctcatgctggaggaactcgatcaggttcgaggcgatggcttgcgagccttcgtcttcgggggagttgtgcgtggtcttgtcggcatagtcggactcgacgatggccacaaccttctccgggtcgacggggatgtaggttgttccgatgcggtcgtcgggacgggtgacgaggtagggcttgcggaagggggggaggtcggtgccggtgatatcgtgcagaccctcgaaggagggcatggcggtgttgacctcgatgatgaccttctcggccatctggatcagctcgggagaagcaccgacggaagcaccggggatgatgccaccgtcctcggtgatggcagtagcctcaatgatagccacgtcgatagtgggcttgggcttgttcaaagtgtaccaaccctgggaaattgttagcggtgaatatttttctccggtaacgcaaaactcacatagaccaaatccgaagggaacatgctcagatgcttatcgaagaacttgatgtggccggtgttgattcccttggcgatttcctttccaacctggtgagggctgcggcgctcaatcatgttcaagtgcgcccaacggctctcggtgtctgcgccggcggaggcaccgacaaacaggttgtacttcagctttccctcgaggctgttcgtctggacgtgatcggccagcgcattggggatcatcctggatcgggttagcgttgccctcgcttactatagtatcgtcgcggtacatacttgggataaccgacaccggtgaatccggaccaaccaatgtacgtgccattggggaagtggtgaatcagatcctcggctttggcgagcttcttcagatacgatgggcgccgtacacggctcttcaacaaggccgaagcagacatgatgtaggaggggagagtgtcaaaaatgttggaaggaagaggaagaaaggggatctcggggtataagtaatttcgttaaccccacgggcagaggtctccacacaggaatgcaaggccgatagctccgggagaatggatgttttaaaaatttagtcttggactggctatatgtatggactcgggatattagacatggatattggacattgaatactgcatagcttattagtatttaagcaccggcatccaatcgttatatatccttcttcttctattaaatttgccttggaatcgtttaatttgcaattcttcgcattcgactaaatcagagtgacgtcacgtccctcattcggctttggttcggccggtcatcgttcggcttttactaagcggcttctctgctgttcccctgcatatggagtacggagatctataattaagagagagctctttcagacgacatgctatccttccaatatattcaacataaacacacacacacacacccccatacacaacagaaaaatcatatctcggaacagataccccgaacttcccccgatccaccctcgggacagaatcggttatgcgggctcggccacacggagatttcagattgcataacctccgtaatggctcatgcatttcacaccattcggcatatatagccgctagcgatgccgattattccgatttagtaacagaagccgatgatctggaggaatggccctttttcataccccggaagttcgacggaatcccgcattagggcatggcgcacattggggaatgtgcgatatcgtacgacgcgattcttattttgttcgagctttggcgttttgtgaggctacggctcggagtacggggactccgtaactataagctcggctagctgttagcctaatgcgggatagttcgacgttgttaaccacacggttaactatttacaatataaaattgattaaggggaagaccttccctttattgcttgatgcctaattacttagccgacggttcttatatcggcatctgttggattaccctttatggtgaaaccgagatatgatagaattagtgataaatcctcattaatacatatcagaataaagccaatctctccatggccattatttcatttgtgagaataaagtaagagatacttgaagagaaaatagagatacaaatacaaactacggaaacccgtgcaaaaaaagaaaaacattcgtcgcaatttcctcatcgtgtacgccatcctcccctcccacaatcaacaataatgcatgccaatccccccgcttcgcaaggggactgacccgtcgtaaaagttaccaacgcaacaccgtctacgcctctgtaggctcggcatccgtcatctcaacatccgccgccttctcctccgcattagcgggggccgcggagccggcgccagacccagacgcagatccctcacgggccgcgggactaccagagagggtcccgtcgacccaagagcggaaccgctggttgctctcgtctacctggtccttgctgaggccgcgggcccaggccgggttattcacgaacttctccacgaagcggtcatggcgcttttcgtgaagcgcggccttctccttggcgagttcgtcggcctgggccttgatggcctcagcgtcggcatccttttccgggatgggcgcgttggagcgccagaaccagtcgtaggtgggcggctggtacagcatcgtgtagttgttggcacagatgcggatggtcaagccgtcgtggtgctgcaggctgcggtagtaccgctcgtactcctcatcttcctcgagcttcggaggaaggttgcgcttcagcaggggcatgcgcatcttcgagaactgcacgccttcggtggggtcgcgcatcgagtaggcggtcacatagtaggaccagcgctcttctggagtgagctcctcgttgtcaagggttgcgtcttcgctggtcatcacttggacggtgacacggcggtcggcggggtactgggattggttagttatgtcagggcatctttgaaattagaactcacgaaagtaatgcgatagatatctccatccttgaccagtcgctccacttgtttgcggtattggatctcctggtggtgggtagtctcctccttctcccgttccttgaagaaaagattgataatatcggagctgcgatcgcgagagtcgccggtgaagatagatgccacaaacttggaaatcgaggagaagatacgttccaagttgtagagcaggtatccgctctggatgtagaagcgacgtagggtctcttcgaggtgaacctgatcgatatcgcccttaataacctcctcgcacatgcgcacgatctgcttgtaaaggttggctttgggatcgacatcatagaagaaatcactagggtatcgatcgatcaagcacaagtcatgggcagccttaggcagaacaccgcgtcggacttgttcgcgggccgtgtcctcttgctccttgatgcgcaggagacgcgagtaaaggatctcaaaagtacgcaagaagcagaagatgttcaggttgcagtacatatggtgctccttcttcttgtacttctcgttcagtgtgtattcatgctcaaggttgaagttgccctttccgggatgctccatccaccgcagttcagccacgtcaaatgattcctcggaatcggagacggtggatggaacctgggcagcaggttcgtcatggttgttcacaccatcctctttaggcttctcggtctggcgtccgcgttcaagggcatcgcgcagaagatccagcttctgcaggtccacccccttgcggctcccattggacgcatcgtcattggcataagtatcatcgtcctcattgatggcgtggtagacttcgtccatgtacaagttgaaagtgtaacggtccaggccgaagaaagtaggaatgaaatcccggataaagttcatgagccgctgaggatcagcgccaaagccattggtgttgcggtcaaagtacaagaaaagcaagtacacagaatccagaaggacctgagtatcgctgaacttatactcagcctggaacttgggtgggacgcggccactcttgcgactagcctgtccatcctcaaacttagtctgtatgtcttgctggatgttcttggcgacgaagagcttcttgtcggtttgcttggtggcgatggcttggtggtcaagactgcgccagtatgctcgctgcatctgttcgcgccagaccttgtcccactcgcgctggcatgccttccattcctcgagcttctgcttcaagcggtaaagaacaataggaaggacgtggcatggacggaggaacatgtctcggatgactttctcgccgcgttgacggtcgtaaatcttcttgatgacacgctggtaaattgcctcgctttggccaccgagaccttgtggcaatttgaaggacatgcgttccgcatcattcatgtaaaggaattgctggcaaatgggctcaatcagctggatggtgcgggtgcaagcctcgatgtggtgatcgtagtcgtggcgatcttcctcaatgcgatgcaaagcatcttcatactggttcttgcggtgcgcaacaaagccagaatcttccgaagcccaggtgggatgtgaggcccagtcatcattaagaacaccgttgcaaagcggatcgcgtccactgcagggcttttggcgttcacgcttaggaaggagtcggtaactcggtcccagagaccggcagtgagccaggttgacgatacctgtttccgggttcgccttggggtcgatgattttatcctcagcctcttcggcactcatgaaacgtctgaaccagttcatgagctcagcattggacccgatgtatccctcggctctcttgaccaggatgtgacgatcgaggagatccgtggtgtacaggttgcaaagcttgaggaagtcgctgaacacttgcttgttcgcgatgaacttcttcacgcggtcaaagaacgcgatttcttcctggctgggagtcatggagaccgagggaggaagaggctctgggagagcaggaatcaaagtgggagagacatttgccatgtcgacagagggctttccatggtgatactttggtctcttgctggcgttgccgaactgcgaattctgacctcggttggcctcagacaagcgagcagcttcagcaccggcaggccccgagatagagccaacaccacctgggccaccacgacgcttcttgctctccttggggtcctttacattaaactggcccagaggaggcatcttgacgtcacggttaggagtctgggaggtgaaacctgcaggttcgccgcggaggttgctaagaggagcttgttcttcggcttggcgctgcgcagctacttgtttggcatgcgcggcagattccggcaagaactgtttgaagtcctccaaaagatccggagcagtgttgaacaactgagtaacctgtccatagacatcctggataggttttgactcccgctggtaagtctgaagtatctcgaggaactgcttgtagatctccggcgcacttgaaaagcggttcttgatcttgttcacgtagctgatggcgtggttgaactccacgggaccacgcttgttcagatcctgagcaccctggagcataccagttccgacgccagccaggttgttcatcggctgggtgagagagttctgtccagaacccatgagggacgacctaccaagtccagcagacgctgcggaggcagcgccttgcagctgtgccactccacggtggtcttgctgatgagtcatggcggaagcagcttgctgctcctgttgggtagggtagccatagtggtgctcctgagcggggcccggtccatcctgctggtacatgccgcccatcatcctcgagccaggagagtaggaaccagatgtggggccctgctgatcctgctgctggccttgccagccaggtcgagtttggtcacgatagaaatcggaccgaccatgcggatcaccggaggggggtgcattggtaatcgtctcaaagggacgtcctgcgcgtggcatgctcagtgtgtttgtaccagacggggttgtgacccgaatcgcatcagggttgtcttcggtaccgcactcaatgcggtagccggggggcaaaaaggtattgaatccttgaataagagcaggatgaccattgaagagtgtcgaaacacgttgaatcacaccaggcgtatcaatagcctggctcttgaaatccttcatgatatccaagaaacggttgtaaacatctggttgatcaacaaaccgcaccttgacctggtcgaggtagctgagagcatcgttgagaatcggttgctggccctgggcaagagctgcaacatttcctggaatttgctgaccggcgttgttgtacgttatcataggctgtcctggtggaccggggtgttgcatgtacgagcgaggtgtgccatcgccgtgttgcatttgaggaccgaacaagccagccgcagactgaggtccgccctggtggctgttctgcgggtttccgccaagagtcgagaggagtccgcccgggccatgaatggagttggggactttattggccacgggttgatggagaggaatcgagccagtgtggctctggacagggtggtggttttggtcgcggcgatctagttgccgctcaatttgttcgcggtggtcgcgctcgcgctcacgatgagccatttcttcgtggcgctgacgctccatgatctcgcgctccctggagtcccgctcccgctcgcgattgagctggggagaagcgtgttgcatggcttgaccaattccgggaagtgaatggccgctgttatgcgacggacctgcttggtgctggccgtacgcggaaggttggtgcggatttccgtgggtctggcttaattctgccagtccaggaagagaatggccacccgactgactagggtggtagggtcctgtaatcgaatgattgttagttaaaacgtttttatcattggttttccgtagaaatcatagttcagaggcactcaccacctggaggggggagtactgggcccgagggctgcgaggcttggccttgctgagagggattttgactgttgaagcgcaagaatatcggattagtctttgatctcaagccacctatagaagtgctcgtacctgaatgaccccaggggccgcggctgctggttcatctgatccaagccaggatgcgacggcggcccaccggaggagtgccagttatcgtttccagaattcatgatgtatgcacgaactccggtgtgagagaagtagaaaggtaggtttggcggataagaagggtcgagaggggagaaaaagtaacagggtctgctaatcagctagagctcgtggtctcgtcggtaggaatcgactggcaacgctcaggttgcagtagggtcacagcatgacccggagtcttgcagattagaagacagaaaccgactccacgcagcaagaaagaaccggcagagaagtatgatagacaaggaggagacacacactggggtgatggaattgcgcgcgaccgatcgcgggctcctgtggaggctttcctctccggggctagcctcttctggcttagtaggtgcttatcggagatttgattatccgatgggtattcagaattcaattcattacggtatctattgtatctattgtatccattggcgggatttccgtcaatgggaggcggtacattggtcacgcgtggtattgtgcgataggtcaatttcagtccgccttcgtcatcgcccgccattgccggcagaaaaacaatggctgacattgagtgggcaggtgaacaaatgtgaatagcatgagtcatgaatagatcaatgacttgaatagaactgttattgttcattgtatattctattgtagcaagctgcataatgagactcgttctgaaggctggggtacctctcgcttgttaagcctcggaaaggggcggaggataagggctggctaacaatgcgtggccttctttcagtactttattcaggcgaccaagcaaaacatctaaaccatatacttggaaatagggaaagacttaacatctcaacactagttgactaccatatctatagtctgtactaactatggaaatggcctcaaacaggcatgacattctctatcatgagttggccaccatacaacgcctttggcaaccccacagcaatagcaggaaacgagtaaaaggggacataggtaagaaagactaggtctccaagactcagacagatgagttccacaataagaacagagatagggaaggggagggaggatagtcctgtgattatggaacctgtggcttgctgtcattattttctggttttcattcttcatatcttgcctgttcaccaaggccctccagccacccgatccaaacccagatgcgcctgtccatggaaaatgataatggcctcgtgacggtacggacttggtccgattaaagagcggagaagacaaagagctatatcgcaattagcattgtaaggtttagatagaggtaatactcacattgtttgtcgccgcaattgcaatgctgtcttcgaagggatgccagctcatgtgcaagatctttttgttgaagtcgatctggtcggcatcggtctccttcttcatgcgactaccggggccggcagggctgccggatcgcgaaccagccttctttccgttacccttgctcatcggcgtcggtacaccaaccttctttgccttgaatgccgacttgtctgcctggagcacaatctccgtatccttttgttcttctgtagggtaaatcatgaagttgttgttgtaactgccggtcataacgttctccgcatcgccagagaagaccacctcgaacttgtcaaagatgctatcgttctcgtacgtatcacagaggcgagggcgcaggtgctcgtggatggggatggtcttgattggctggcgttccatgttgacatcccaaatcttcactgtcaagtagtccctcgacacaatgtaccgcccgtcgttggagaatcgcacatcggagatggaggagataatctcggagaagaaggaacgggacgaggcatcctcttcttgttcgaactctgcaaacagtcagtaaatgtcattggcgccattccagctgtacatacgcttggcgtgttcgtcacacaacgccctttgtcgcatatccgcaagcttgattgtgcccttggagctggcatacatgaaccagttacagctaaccgggtggaactcggccgcagtgatgacctctgtgagttcctccatattagctggcttgatatccacgatgttgaagctctgatcttggatgttgagattccataggttcacccgcaggtcgtcactgctgataaaggtttcaccatcgctgttaacggagatgctatttatatgatacgcgtgagcgttggcgtatgttctccgcggaacggcagcgacaaccgtgtcatggtgtgtcagacgaggcagcttgagcgcagaggggtccttgaaggatatgcggggtgcgcgagccatacccccaccaccgacaggattcgcgggggtgagttcactcgataagttgttctcggcgaccactttcagcgacttgtcgaagaccttccaaagctttatcgtcttgtcgttcgtcgaaaggaggaaatgggatgcattctgtcgtcggcaccattttatcttgttgatcttctcttcgatctctagcgacttgagataatcgaactctggctcgtgtgactggaactctgtgtggaacttatactcgcaggtttttttctgtattgtttagtggttagccgcaagacaagaaaaccttgatgacggaggggtggctaccgtctcatttcgctcaaacaacaccacccttcctcccttgtcaccagtggccagatagttaccggtatggtcaaattcgacggttgagatgatgtcggctgcatagcgcgagtcagtcgatgcattctgtagaaaatgaccaggttcggccgagaagtgcgagggaggccaaataccttctgtaatatcttctacatcacctttatcgccgaagcatctaatatcaagttagctatcattcaatgactgtgattggtcgatggcgctggacaaagggaagaaaaatggaaaccataggaccagaacctttgacaggagtgagccgggcaaacttactgtgtgaacttccaggtaggtgtgcctggatctctgtctaccattttcacgttctagctagcccttgaacgcgacaagggcaaggaccaagataggagggacgggaaatgcgggttggcaagtgcctctgaaagctctattgtcgatgcaaagaaaccctcggattgaagcgatgtagacgcgatagccgacaagaaagaatccggtcgggtgggaagaacgattggatacggagatggagagaacagtcggtcaccggagatggtgtgcgaggggtttggagggcggatagcggtaaggcgaaaagaggggcagagggggggaagagcaacgatccaagttggaaagacgagctgaagaagagctgttgccgaatgaaatgggcaacgtcgctggatgatagaacacaatgaatgtgttatgagtggacccgcagcgcttgagaagggataagagaaaagtttctattgagcggtcttgagttagaacggaactccgtaaaagatatatcaaacgctccatcggttgtggggatgggggttgcgtacctgatctggagcgatgaaggaaagacaaaagaagttgtcaggtgaagttgcctgagtcgaggcggtggtggggagagagttcgttacgagataccagctgacggttcttggcccgtcaatatcaacagattgtggtttcgccaaagatgaaaaaatataaacttgattagaagattgaatattctatcttcaccagaattcaggtcgggctgcaacatgctgacatcaacactgttggcgactgcaacatggcccgttgcgcccctccccggccttgcaacccgtatacgactacgcctgggggtagaggtggaatatcaattgaaatcgtgagatataatctagctaattgcttggatcgagcgagtctacagcagtcaattctttatttcatcgtctatatgcccgaagctgtactatgcgcctctgtcgtcatccttgaggcccaagcagtctccgctaaattaagcattggcatatatcatatgctatctatgttgtgaagagatgcgatactccatcgaattgaaactatttattcaggtccggggtatccatttgagaactcagctgggtatactcggttcttctggaagtatatatttgactgccgagccctgtcgtttctactctacctaagccctaattaagatcctataactgaaaagactctatttaccttattaactgatattaactcttatataacatcccatctccctattacagcctataggatcctacattctaatcccactcaccatcacatgcttccctccaatatccggcccaaagcatattaagccgaacacgccgacaaccttggaatcatctcaaatttcaacctcacttaatcctacacctccaacccataatccctaatcccaaaaccaaacaccaaagccatgagcaacccagagaacatgcggggcaatcccaactccaaaccccaaaactccaataccccagcctcagccccagccccagccccatcatcctcaacctcaacctcaaacacatcccaaccccctccctcccccgcgcccccctcgctagcaacccgcatccaaacctccgcaacaggcctagcaaaaagcgccttccagccaagccccgacctagcgcagaccctagcatcgagcacaagcagcaaacaagccggaccgccctctctcccaagcacacagacaagcagggatctatccacaaccacaccacagcatggaggccccagttccagttccggctctgcagcacaatccttccgcgaaccggatacatatacctcgacgggtggattcggtctaccggcattgacagaagacgagttccagaacacatacgcatacgagcgagaaacaggccttctaggcacaaccatgactccaaccacaaccacatatacaaacacaaccgacactacccacgaagacctccaaacaaaaggaaaagcccgcgcccacgacccaacccagcaccagctcgaatccgtctggcagcgccaatcgcacgagccacacagccaggatacatatacatcgctgacatcgccggaagacgggtcagcggtcatctcgctgctctcggacgtaaccttcgatccgaatttcgaggaccccgcgacggtgccagatacagaggttgatattgctgctgcgccgggtccgctgtctgcggctgagcgagaggcgctggattcgttccggaaggggatggggctggatggggaggataaggggcgggtgggacggttaacgggtgcgagtctcgtgcctgatattgatgtttttttgagccagggacttggagggaatgtttcgacgtcggcttcgacttcccttcgtgatgcggttctgacgaatcttcctggtgcgggggattggattggcgttcaggataggtatcatgatgaggtttgggggtttttgcagcctgtgcttgaggatgcgagggctgagattgaggagaagggggagggattggggcctgcggaggatgggcctgctgtgagaaggttgaggatgattttgatgcatatgaaggggtgattgtatgtgtttgggatatggagtggagggttgggtgtatgttctagtgcttttgtagtagggatctttggtttttttcgatataccgtgtacatttaaatgtaaatattagagagggagtgagtatgtatttggctgtacaaagatgatgggtaaaacatagtttttggagcagacctaagccctgaacagagggactcaccacagctaccactacagtacaactacatcactcccaaacatatatattccaagaatatattccaaataagctatgtatgtatgttacacaagaaccaaagttgacccaagtaaaatcttgaatcccgaggactgcaaaagcaagcgtgtcaagccagcacaagaaacaacagaaagagaagaaacgggggtatgagagatcacacgctggaggatcatatttcatcggagagcggtcatcaaggagaagagacataaaggagaagcagggtttaatgtaaacctacaactccaagctgggggtctggcccttgacacgaccgatcacagtctgagcggcgtacttggggatgacctcgtcgtcgtgcagcatggcgaactcctcggtagcatcgcgacccatgaagttgtacagggcgtttgcgccgccggggtgctcgtcgacccagttggtgagatcgaggatgacgcccttgaccacgacccagaagtccttcttggtgttgtgctcggcgacttcatccatgctgtactccgtctcgggaaccttgaaggtcgcggggtcgggcttgggggctggggcctcggcgctggcggcaggtgcagcagcggggacagggagagcgggcaggctgccgccggtggcgccactgccccactcgacagagatcttgcctggggtgttggggtcgatgtggagagagagctggccgagacgctgggaggcggcgccgccgccgttgctgaggagcttctggaggaggtgctgggtggcggagtcgcctgcgacacggccgtagacgacacagccgaggagggaggaaccgccgagacggttggcgccgtggacgccaccggcgagctcaccgcaggcgtagaggccctcgaagggcttttcctcgctgttgaggacctgggcgtgctcgttgatctcgatgccgcccatggtgaagtgcagaacaggctccatgacagagacgtggaactcgtcgtcgagcttgaagggcatgttggcgaagaagcgcttgttccaggggtccttcttcttgccttcggcgatgaggttgtactcgtcgaaggtcttcttgagggctgcttcgccgcagccgatttcggcaacgagctcggcgccggtcatcttcttcatcaggccgcggccggtgtagtgacgggtgtggaaatccaggaccttggaggctttgctgttgaggacgaggcggatgggccacttgcccttttccttttcttcccacattttgccggagacgtagtcacggtgaccgagctcgtcggagaaccgctggccgtcgcagttgaggaggagaccaccttcaccccggagggcttcggcagccaggaacttgaacttggcgccggggtccttggggtcgacgagaccggtagggtggacctggaccttgtccatgtcgatgccgttggcgccaatggccatcagcatcttctggccgtcaccagtagcgtgagtaccgttggtagaggacagcccgtaggtgtcggggcggtacttcttgaggagagaagtctcactgaagtcagcggcgtaaccaccggtagcgagaatgacgacaccgtcggcgaccttcttctcgccgtcaacagtgtaggtaacgccggtgacattgttaccagacttgttgacggaggtgacgtcggccttcttgatgatctggacacgactgggctccttctcggcgagatcttccaatcgctgcatcagggcgtaggtaatggccataccggggaacttggcgtcatgaccgcggtgtgtgcgggggaaagtgtgtcctccgagacgggagacgagggtgaggtcgaggttgaagacatcctgcagccactcgacggcggcggcggacttgtaggtcaggaccttgatcaggtcgggacgggccttgtcacgggccgacttgagggtgtcatcgtagaactgcttgacgctgtcctggatgccgagatcgacctgggtgcgggtgagagcaccgttgataccggaagtggccttggtagagttaccaccgaagaacgcctgcttgtccagaaccaggacgttgccaccgttgaggtagacggtgtgtgcggcactgaggccagagactgggagggtcagctagggcagagaatgcggggaaaggaagcttacggccaccaccgaccacaattacttgaggtgcagccattatttatgtatagttaggataaagggaaatatggggaggaaaagaaagaggaaggagggaaaggatcttaaagaaaaggaccgggggaggtcagaagccgacggtctatcggccgaggcaggacatgggaggacgtggggagacaaaagatggggtacccgccggacgactaattggccaccgctggtttgttcgtattatctggggaagacgggatcacatgcgatatagggatggatgtgtttccaaggctattaggttgaagtctagaatgtcattttcatttcattttcacatgcgtcttggtgtcacattccagtcctttcaagggctgaaaaggaggaattggataggtccatagtcgacggaattagactattgcaactagaccggtgggttagaaacaaatacaataaatagacatcgaattccggcttcctcggtctttacagtaccaggtgccaacctcggaataacaatcgcggccgaagtatccgaattgtccacgggtggatggcatgatgaggagaaagtaccacttaagttgaatccttgcaagtgggcagacatgtaatccagctacacccatatatatcgtgtacagaggtgtataatacggactttatatccccgtcgatgtctgcgatatcaaatcgccagcccaggggccttggaaatggccagaaagaggcaaaagcagttgccggctgaggaacacgtggctgctgattggtggaatctcggtgtggggctgacctaatccggggatgggaaatgcctcggtggggccgatgacctcatggatccccgtgcgtcgattggtgtttttcgcttcaaatgccgaccttcttggtctgctgtatatacacttggagaggagcttcatcggtttacactccaccagaccttattctcgttgagctcaacattacatttgcctattgtgaatatccgctacggtcgctcgggtcaatacccaccgagaaaccatcaaacgggatctgtacgagacgagtgggctgttgggatataatggacacgccgatggatatggtgtactccgtacatattctaatgaatcaaaacgcttatggcagatccaaaaaaagcctaatccatccaggtaacactcttcgtaaccaagaactcattcaatccctcatcagtattgaaccggccccagccactattcttcacaccgccatggggaagagccggctcatcatggatcgtcatgctattaatatggaccgccctgcaaaagtcagcacagatccacccaaatccgaatctagatctgcaacaccaacatacccagattgaatgcgtctagccatcgccaagcccctccgcagatcctccgtgaacacagacgccgagagtccatacccacttccattcgcgagacggatcgcctcgtcctcgctgtcgaagggcatacacgccgcaacggacgcgaacgactcctcctgccacagcgccatgtcttccgtcacgccgcctaggacagcgggcgccatccgcactcccgagtcggtggggacgctgtccgcagacccggagatgaagtgtgcgcctgccgagacggcgctggcgatgagggcttcgacgcgggtcttggaggctgtgttgacgagcgtcggggggagggctgaggctgctgcgccggctgcgagggccttttgcagggcttctgtgaaggctgggaggatggaagtgtggacgaggattcgatcggttgccatgcagatctggccggactaacacggaaggagataggttagagacagatatagatatgcgacgtgcgacatatactcacattcaagaatgcacccgccaacactccctgcaccgcagtctgcaaatcagcatcccgacaaacaatcgagctattcttcccgcccagttccataagacaaggcttgagattctgaccgcaggcgcgcgcaatcttccgaccaacagctgtgctaccagtgaaatttatcttgcgcacggcctcgtgctcgatcatggcattgacgacctcgggggcatcctgcggggcgcagtgaatgatattcaaacagccagcgggaaggccagcatcctcaaaggcacggccgatagcccagtagcagcggggagttagctcagaagacttgaggactgtcgtattgccagctgcgagggcacaagccgcagagcgaatgccaaacacatagggcgcgttcctgtagaaccaataatataatcagcctgctatcaatagcattttccacacccgaggtcgatataggaaataaagttctcgggaaccagtacccaccacggcacaatccccagaataacacccatcgcctccttaaaaacaatcgcactctgaccctccgtctcgacgaccggcacactgccacatatcgacgtgatgcggctcgcgacttcgcggagcatgcgcacggcgagcgggacgacgaatcccgcagaggcgccgacgtccgcgcccatttcttgccgcatgtactcggcgttcatgttgaggcgggcttcgaggagatcggcggctttgaggaggatgtcgcgtctcacggttggtttggtctgcgaccatgaggggaaggcggcggaggcggcttcgacggcgcggattgcatcttggggtgttgcggccgaggcggtccagatggtcgtgttggtgtaggggcttgttactgggaaggtgttgggggttgtttcttcatggccgtttatgaggagggggacggtgaatccggggttggttgagtttggcatggtggggtacggggtagaggtagggtagagataggagtagtatgagtataggaggtatgcaggttgttgtaggagataatagaggcagtattaacctcggcatgaatatttttactcctttacatgcattgtattctatctcattccgcaacaattgaattcggagctgatcgcggacgatctttaggcaccgcgttgcctaatggaactattccgcgatatgcgaccattatttgatcgctttccaccgtctaatgctgatttttttatacagatttcgtctatactgtacacaaatcggcacattcaggggtatccagtgatcgacaagatatgaggtaactgaagattgtgggattcaggtccactgcgcgcaattgggcttggaagagcgccctaaccagctatctgaagaacccactccggtgtggcctgtcttcataggatgtgcatttaccccgccaccttctttattcggatgcgttcgcagtagcgtgtcaagttaaacttcgcctcggctgtttaatagcgcggattttcaacgctattgactcgggatctacattgccagtttaaccgagacttgggagagaagtgaattgtgggtgagaccatagtggcgtccggatggcttttcagtctgtggaggtcatacatgaatatgtatgcagtacggagacggagtgtgcacatacagatccatgaggatatatggagtaggatccaagtgcgaatatggatacatagtctaatggcaatagtccaatagttgatccttgcaaggttgcaatcggctcaagttcgcatgattcagtctcagctggtatcagatggcgatcgcagggatatcccttcctaatatagcggctaacagcccctacttggatccactgacctactctacagagaaagcatttgtcattccttgaaagaagctatgctttgtatgccgttgtgcggtctccacgatacatcgctaaagacccaaaaatcagaatagggtctactcttctgaaacttgtgatggatctcattgcatcatccacgtggttcagtcgcgtatattccgcacgaaccagatccccattaggacaacgatcggccactaggggttgcgtgtgagtggataaacaatgggaatgtggaatctcgagctagcctagggttccagggccccggactgatctggacactcgcgtggtacatgttttatatcggaggaacgcccagagattgtgtttcccattcattcctttcttattcatacataccataccttcttgttcggttgcagctcactcgttcaatattgggttgcatattgaaagtacaatggcgccaagcaagaggggttggcagatgattgagatcgtttcggtcttggtcgctctgtgcctgatctcgctggtgctgcgtgtctttgctcgcattcgcaggagagtcgggttcggcgtcgatgattatctgagcatgttgtccatggtgctcctcattggcatgttgatcgagctgattctttgtaagtatgactccaccgactggaattcatccgtactaacggctaccagggtgtacaatcggaggcaatggagtccatatcgcggatctctcccccgataccctcgtgaactactggaaggtacataccccgcaatatccaatatcaacaacccaacctaacaccgctagatcttcctcgccaaccaattcacgtacttcctactcagcccttctatcaaaatctccatcatctgcttctaccgccgcatcttcgcaaccccaaagttccaaaaagtcagcttcggcataaactgcctaatcgccgcatggggcacaggaatcttcctcgcgtgcgccggacaatgccgacccttacgctcctactgggaccacagcacgaaaggaacatgtttcaacgcgaaagaattcatcgtcgtcaaccaagccttcaacgtagtcatggacttcgtgatcctcgtcctgcccatcccaatgatctggaacctgcaccgcgcatggcaagacaagctcgccctaaacggggtattcgccctcggcaccttcgtctgcttcgccagcatctaccgcatcgtcgtgctcttctggatcagcccgtccgacccaaccttcaccgtctaccaggcgacgctgtggacgcacatcgagcctgccgttggtctgatctgctccaacttgccgattatccgcggtctgttcccggcgtttaagctgaccacctcgcgtaatggaacgggtccggcgtatatcaataccgattacacgaattctttgttcttgtcgaattctggtccgcgctcgcccgatctcgagtatgctaagatgtataatgcgcagatcgagagcaagccgcctggttaccttggtgatgatatccatccgcagacgattaatgttcagacggatatttctatcatcccggggaatgattctactacgaggctgaaccactgaggtggtgtgctgttgatttacgccgttacgatgtgatgatatttttatcttctgttttgggacgggatattggagcgaatgggtttattttcttggaggaaagccgaatctgcttcggctgtagctaggtcggaaatggcctaccggatatcgtaataggactaaacagaaggggctgaagaggatgcagagcgggcatatcagtatgccacttttccttcactttatgttcatacatatacgatttacctatgtacacaatgaatttcttcgattttgcctaataattcatactatacctttcttgttgtgatatttataccaaaattgttatttattcatggatttagtcgaaaacattcagaagtacgttgatagaaaggtgtatgaagccgcagctttcgctttgcaacgacggtattttaattaagtatagtactcgagagacagatgcaacgtatatcagcaatcgagcgtgatttccatttctcggacaggctaaaaggatatgcaagagtagtagaaggcatgagttcgtaggtctttcatcaggatacacagacgagatagagcagatcattcagtgcaccatctggctcgtggcgaattcctagaatcaaatattagcaagaagaccaacctcagacagaaggaaagacataccgggaactgatcagagatactagtcgcaacacgttccacatcctccgcaagatcctgcacaccgagatcccactgcctcagcttcgtcccgttagaagcacccgccgaggagccaccgagagtgtcagcatcaaacgagataaccccatcaatctgatcaatccggccacgtagccgtccctgctcaaccatgcgcgcggcataagcctccgccttctcgccagcagagacatcacccgaagactgcaaccccaggatcgagcccaggtcatcaacgtggatattctcatacagcttgctcgccgccacgagattgtgctcgataaccgccttgtcgagaacggtcgtgccgtccgccgtaacagcgagctggtgcggcgcaagtttcttcgcgaacgcggcgacttcgtccgctgtaagcagcctgtccaggaacatcttctccaagatgccgaattcctcaacggagggcgtgcggtcatctttgtacagacgagcgagggagcgggagcgctgcggaccggcaggcgcaaggacagcacagcggatcgccgcggatagggccgtcaggcggtcttcttcgtcgacgcccggcgcaagactcacgttgaaatattcctgggcggcgtcaaggaagcggcggcgggcatcgaggatgcgggcctgggagagctggaagtagagctttgcatcgtggtcctctattttggaggggaggttcttgatgcggttgaggaaggcttcggcgttggtggtgtcgtcgtcttcgaggtagtagcgcacgatgcggatccagaggcgggctttcgcggcatctgagactaggcgctgcgagctgtcgatgtgaatgccctgtagggtgcgggcggcggctgtgtagtcttcctgggattcgtaggcgtctgcgaggatctcgcggatctgcgagtcttgttcttcgacggaggccgagcgcgtgtggaggagggtgatggcgtgctggccgacttttatttttgtttccgggtcgagggattggaggactgtgatgaaggcgtcgaggagggggcgggcagcgacgatgctcacttcttcgctgaggattgagtctaggtagtagactagatcttgggcgagttcgtggccgctggaggttgctaccatctcattgaggagctcggtgtattgctgtagctttgttggctggtgcgggtttgtttcgatgcccgctagggcgttggtcatcttttgggaagccatgctggtcgagtgagtgaaagaggttgtcaagagagttggacgcggagtggtggggacatccgagctcctgttatcgataagagctggctggatgtatacagccctattccgtagagacagaacaatggaactcatttaatctggccataacacaggtaggattagtcttatgaagatgattcacagatttcattttccctaagtagctatatgcgtaggggcatcttcatatttgaactaaatgcattgatatgcgccttctctcccttgagtgaaaaagaaatcatatgcatttgaccttgacagcgccacaaatgttaatttaatcctttgaaatgcctcggaagtaaatatcacggacggtatccctggtaatcgcagaatatagtgaagcatacagttaaaatacgcatggtcggagccttggttaggcctatcctacactctttagtccctctagtcgggaacggttccgattatgattatgataattattgatgcctcggggtattcaagcttgatgaaaatgtgacaatgtgacaacaaactacaagcaacatggctttctaggatggaggcgtagcgctaagaaccctggaccccggcatattaggagccgacaccgccagcgcaactcccagtaaacgtgtcttcattatctctatcgattgtatctcgtacacctgacccatagccgatacttcgttgttctatctagactcttggggctttacaagtgcccgaagatacgcatcacttgtgaaaggacgcgccaccgttcctgataggatcaagacctttgtctatcacggaaatcggattgaatatcattatggctatacagagtgtcaggtctacccccgagtttgtttcgtctctctactaccctgtgtctctgactgattaaaatcgcatgaagggccctactggaagcgccgatatgcagtcaccctatcccagatgcatccgggaagctcgcggtctacacacagcggggttattcgttcaaatcgcacagcgcgttcgcacagattcgcgtgcgggagatggatacaccaagatcctgggctatcaccgacaaccctcatgccaattatccgagatggctcagccgcagcgagaaagctcatctggctggaggtcatggaaaatgggcacagcattgatcgcagataatatcaccttcaacatgctctctcacctagccagcagcacacaagatttgatatatggaccgccttgggtgaaaccagaggagtggagaaaatgggacctgcacaacatgccgggaactggaagacgccacaattgatcatccacggagcactaaatcgtcagcatcctctgaagccctggctgcattcaacactctgaatttgcagtcagttgagagtgctcttctcatatttccggatgagggtcatcagatccggagccccgagaatttactcttgtggtaccgcactgtgcttgactggttgaagaagcatacaagacaagatgcatgagatattccagaagattcagcaagtgctacgaggttgtcaacctacataagcatcatttttagtagttggtagtcatttcaacgtctttctcgaagtttttctctgactctttctccgagtcattttttgaagtgattgcttttctcatagaatgataagaataatctgcaaatatgcaaaccaaaaaatcccatcgtctgcttgagcttaccaatgccaaggtctagatagacgtcaactctgggtgatagcagaagatagtgaatggcgacgtctggcaacttgaagttgtggttacggtaatgaattctacaggtaaaatacgtatattacgaataatatttacgaaccctgcccgtcaacaaccacattacaagaaccttcaaatcctagaaacttcgacttgatcattgttctgtcccacgaaatggcagaattacaggaagttctaaaagactttattgacattcttgacctaagacaggcctatgtctggaatgcggattccgcgaataaacccctagcattcccaagaaacccacgtgcagaaacgcttcttcgacgcaaattgcttggggatcttctgccatatcctacaatgttcaattgcatctggatagcagagggtgaagaccgaggttgcttcttcttcattgcctagacgatataaggaagcaaatgccttatagacgaagacggccaaagaagactttctttgatcaatgatgctaatatggtgtcaaaggggtatatcatggtcgattgtcacgctcgggtaggggtgtgtctaagagggcaccgtaaaacctatctcgaaacccgaatgtagtgtttaaatagagaaggttgttattcttgtaggttatacgaaggctttgaataatattgtggaactagaaactagaacttacatgtaccttttgtacggtctgcctagcaaaaggtacatttatatgggtagaggccccttgtttgcgagtctggaatttggcccttcagcagtatgaggacaattattatcctacttatgaaagaagaaaaggaaaactcaaactcatcataaaaccagcccaccttgggtatcatttatctcgaaactaagttataccaattaaaaccaatctatatccaatatcacagttcacagttcacaatcttacaattcacacctttgtcaccaaagacacacaccgtctttagatctaaccccattccagtttaagcccactttccaagcagagccatgataccagcaccaaggagcatagatatgaccatgaaagccaaccgcttgttgtcctgagtgcggtgagggtcgaacaagaagtcgcgagcaagcagctcaacgagaccagtgtacaccaagattccagcggagatggcatccagcacaccggagacaacattggcagtgtaagaaccagggttgtaagtagtgcggacaccaagaccaatagcgatggaaatgggcgtcgtgagaccataggcggtacacaagaaccaaggcagccagctccccttcttgaatgggatactggacatgcgggctccaataccgagaccctcgaaggactggtggaagaccagaacagggtaaagtgtagcaaactcgtcaccggcaacaccgaggttcaggccgataatgacggagtggaagataacaccgaactccagaatcagcagcgcggcaatttgctgtctgacagagcgctcgatagccacctcctcggactgcgactcaatctctttggcttgcttgtcgtctgcgtggcgtcccgaaacacgcgagtccacacggcgcacctcgcctccagtcgacataatgggctcggggtcttcacggcagataccgtacttgatctcgacgtagcgctcggcaccgaagtccatgaggaagaccatcatcatggatgtcaatacgattgcagggcaccatgagtagtcggcccagtggccggtcataccgacgcaggaggcgggaccgatttcgtcgtaggcgggatcgaggagatggatgaaggctgttgcgacaattacaccagcaccgaagtaccttgcgaagagatagacgtagactgggatgcgcaggcgtggtacacgttgtgcgaccacggggaagaaggttgctgccgaagagatgaacatgatgacgaagatggcggagattcgcgcgcctagctggccattgtattcattgccttcggaattaaggtaacacacgatgtcagtcgggtcggctgtgtccaggtcgacattgtgaggatcgaaggacattttgggcggttatgttggtaaatcgtgccctaacgttcaaagaaagaggccgatataataagatcgaagaagagggaaattcacacggcgatcttgtctacaggtatggcaggaaatgcctgactgttttatattggagaaaaaattttaggcctcttcgggtcctccgttgaagtgaggacctttgggacgtctcggccccagttatattagtctggtggttaccttgtattgtccgttccaggttgcattactcgcttattctagttgccttggacctttgtatgttattataatatctaattaatgtaaatgtttctaatccgcgttgttgttgttgttgttgttgttgttgtgctgagaacttagggcttccatgccccttgagatatcaaatgcccagacgggaacaaccaccagccctacggacgtttcttttgaaaaccaaggctcggccaattgcttgtcgaatcttgggacgatgcaagcctttcacgcaagtcttgctggtgggccaaatcccgtcgtagtgattgggtgttagcgccacgagtttcccccaaggtccctgaactaagattacgcgaggtcaaaccctgccatcacgggtttttcatcgaggagatatgactgaaacgggcaggtggtgcgtagtagctcgaacttacatgtccatttcatcgtcccatgtgtactgagtatgtttagagatgtggatagttcgtaatataaacatgatctgatccgctccgcagagacactttccgtcgtcaagcgcggtaacggtgctggatcggctagaaccgagccaataatggattgagcaaaggaatttacatcgtaagagcggttcgtgtcgcgtcgtgaagatatcacattgtcatggcttcatcgcattcgttagccttgtcgccacccattggtgggttcagtacaaaatcactcagactaagacaaccctgcgagttaaatccggactttagactgaaactcacaaggtctgagagcactaggagaaaatatttgtaaccatgaaaaagcaaggttcatccaacctgaaagcaggaggccatccccatccatttcgactcataattgcctaacactgccctagccagagcgctaatagtaacataaaacataaaaagatcataaaacaaatcataaaaagcggagttgaatgcaaggtatgcaaggtttcttcataactcatctcgtttctcgtatcccatacccaagatctcccaggctgcagagaggatccgaggtctgtatacataaacacataatttaggttttcaccctgtcgtataatatagtctcctcccatcaaaacaagaaacaaaacacgctccgaagccaatcgctgaaatcatcacacgctacctgtgcccgagtgaacctgactctgggaccgaactcaaaaaaagacagtgaaaaagatacaaaaaacagtaaagtgttgcgtgacctatcgttgcacgctagtatttcaaggccattgctggcacgtatttttcaagaagaaaaaaggatgtcaaaataaaaagggcagatcaagcaacaattcccagcaggaattgtaagaaatgcaagaaatgcaagaaaggtagaagaaaaagtgacaagaaatatggtcttgttgagatcacgggactgacccggaaatcaggagtggaaaataccctcctccttgacggggttatcataaccgtgaccttggaccatgcgacggaagtcccgcacaaccttttcaggcacgcggtcccacatcaaagatctagaatacacattcgacgacaatgcggaatgaatacgactctgctgcgcggcgatatcccgcatcgcagcaaacgcctgctgcagggtagatggctgctggggcttgaagtttccgttgtcattctcaaacgttgtcagggagttgtaatggtcagcgttcatcgagaacacctgatcgcgctgttgctgctctgtcggcatgacgagcgtgttatgcaactggtcgagacttgagggcacgggttgcgcagagctcatctgcgccatctccatgccactgatagttgccggcgcgggtccggttgctgttccatggttggaatgagagttagttagctcgtggccagacgacgaggctaacactgctttcagcacattggctgactccgcccggtactcctcggagagttggggcagggagtttcccgggagggacgtattgtttgaggcgaagaaggcaccgacaagcaggaacatgtagaaggcgttccagctgatcggcaggtctgatccattgttggatttctccgggaccttgacctgagcatggggagtttggacacagtctgattgcaggagaggtcccgtgaccgtcgagaagtcatcccatgagtggttttccatggtcgggttctcgaagccggtgaattcaccggtcatgatttcttggacgggcttgacgctgcgctccagctgtttgtttctctcctccagcatgttgttcctcttcaacaggttggcggtctcccgcgtgtgcctgagaatagtttcatctttctccatgtcctggcgttggatgtgctcggtcaactgcctgttgtaggcagtcaattggtgattctcgtaatcctggttcttcattgcgctttgcatgttctggattttctcctccagttgcgcgagctttttagcctgttccgcgataatttcgtccttcaccttgagcttttcgatattaccctcggcttccttcttcttgcgttgacgggattgcaggctattgtgataaggttaacatgtgatccagctcaacgcatcaatctcaacttacgctgcatcacgattccgcagcagtcgtttgatcgacttgaggtccttcttcttctcctcgtccacgcagttccggatcgcgtcgtcgatgttggccaaggtgagttcggcggagatttcaatgcgggaattcctcttccgaatcccatctcctcgccgcaacggtatggccatccggtaatccgggctctttctcgcttgcaactccgcctcggccagatccattggcgccggcatccagccctggctggattgcggtgacatgacgacgctgccagaagccgcaaatggcatacctccacggtacgacatggggttcatgggcatcgtgcaaacgggtccaaccgcaccaccggagaaaggaccgacggcaccctggtctccattggaagcatactgatcatagcccacggtcggggtacatgagcctgaatccgtacgcggcatgggccacgctgcctgcgagcaactttgctggtaggaagatggttgcgggccgtcaattggcatgaacgaggcacccgagttcatcatggtatgcccgagttgcgaatgcgaattggaattggaatttgactgagactggctgctggtatttgagtaattggaccagacggaatcccgatgtgagtaggcatctggggcgtcgtaggaggtgcggcggttgtcggggtggtcttcggaattcggatcaaggatcctgtcatccaacacgctcatctcgtcgtcttccggggtcacgtctaacgttgatggtgattgttggtagaattcagactggaaatattgtgccatcatgaagaggcggtgtgtgtgagaaacggtggagtggggctggggaagatgctggtttatagagaaaatggtatagaggcaaaccacccaagggagaagataatagtcgggaatcaatatgaagatgacatataatagtaaagaggggggaaatatgctgtgatctagttccgggggggaggcaggatatgtatgagccgatgcagcagtgctcgtgcggttcgatattgtacccacaggtaccgagtaccgatgtaggtgatggaggatggcctgtcgatcaagtacctagtactcatcccgccgtctacgcgggagcgcgagtgtggcccccggaacagcatctccgttattggctgcattgttttgcttgggcagacctgcatttgttgatgttcgactattttggttggtattttggttattcttgaattttcggctgggttttattttatttctcattggaaggttttttggtatattttggttttattatgatcagtctcaatggtcatgctggcggggataattgactacattggtaccaaggatgggaaatgatatcgtatacaacatagtgcttttccttcctcttctctccgtaaacccggagccaccaacaatcctaagtgggggaaggagtcttccttctctttcgggcttatcgataaacgatagcctatcgatcgatcctcgttccgccggccgtagacatccctgtcgtggggaggatatggtctgtgctataccttattcacggcgcttaggtagaatacccaatgctacttcggacttcacctgcacgactacctgaaactactgtttgaaagtatatttttgtacccccatgtactaaactgatcccctttgaatggtcagatgtccagtctaactgtcatccttctttctatccgccgctaacagccaatcattcccgagtcagtgtgacggcttctttgggctgccatccatggcgccttggatgttttgctttttttctttgttgtgctccttattccgattcattatagttcccttccttcgtatagtctaggatgagtctctatagaatgaatctttgggacgggctcggcccgctgatccactgttgggccgaccatggatgagaaaagaaggaaaaaaaaataggaaagcacggatgtcatgcactgatcactcgtcccatccagatgacaacctccccctccaaaaccaaattccccgaatggagctaccctggaggttaaggctcgatagcttagagtaagagcttgggtcgaaaatctcacacacctgatcttgctcaatcttgccgtgatctacttgcagctctctctgcagctcccatatggctgcagcagcctcctttccaactcttctgagctcacagaccacatttaatccatgatcgactatgcggagtgcaggggacatgatgccatcgtattgacgggtgccttccggcttgctgagctgcgggggggatatcctaatctaccactattattaccaatatactaacatctccaacttcgaccacgattcaccatgagctgtcattgagctgtctcttctttttttctggctttcccccacaattcaatcagtccccatctctagccttgcccaaagcgtagaccgggttcctgtcagttcaattccccggagcacacgccttcggcggcagccgctgagtctgttcacaatctatacatagcacacagcacatatcctgtgccagtgataggcctgtcacctgggcggcaacttcgcgggtgggcaacttagcccggataagatctggcggtgaaaaagctgagtctgtccaatggagatccagtatgccaccggtcaagcagtccacccgtggacgggttcactgctacattagtcataaacagggaaatattttcagtcaaggtcccccggcggcattcttgttttttactagctcatgacgcttccaccaaatgcagtatagtcttctagaagccggtcccagtatcatagtcctttgcgtatacaccggtagattcagcacccgtaccttccctattgcgacactggcatattcgcccttcctgcggtgaagctgaaaccaatgttttgccatgtgactcggaatgaaactggtgatctaccttctctgaatgagctagaaggcagtggcaggtccacggtccaccactccacttgcattctaatatttatgtagctaatggtccacttctttcacgctgcatacaacttggaatacgacgtacactgtacgtgcccaagggtctgtaaaacatctccccggtgcaagctagccggatacgatctcaaagcctcactttgaagtggtacctgcctgatatgccgtgcacagggtacattgggcacatcggatgggagtaagccattgccttggaaactggatgtgactgggccactagctgctcactgctagccctcttttatgctccacatgccggattggggactcgttggcgtttttcatgaatgtagtctgcctatcggggaattcagcttttcttggacccgtcgggggaagcatatttgatctctgtgccgaggatcctccttcaccggttgaaatgactcattctgtagtagggcgagagatgaatgaaaggtcttgagagtttctgtcgcttggtgcggttatgaccagctaacacgtcgtcggaatgagtttcaagcaggtggaccaacatacaggaatcccaatattgagacagagaagctattactcagtacttccgctagactgagtcactatctctttttggctattctcgtccgatagactggctttctgctactattcttgtccgaaggattcatattcttttgttggatgacgtttccaattttgcttagagcagattttctatcctgcactaaagcccaacagtcaattccaacgtagtagaacaattagtcttccaattcaacaattcaacaaagccgaaggaccaaaaccaacacaagatggtgttggtagacaagcccatatgcgtggcttgacctagccgccgacgcttccaagtgttggtgatacgcagagtttgcaggatgtcaagagaagagtctaggattatgtctagctatagcccccgacaatagatcaattggttctcaggaattacattctagattgaccttgacaattgctcatttagacaaggaagtgcttgacttcaacccgtacattatcaccatctcgacttgctcaatcgagacatgccgcggcgttgatcacaacgttacatctttgtaaatgttttaaacttgcattccaactattgtctatgactgtactcttccgctttccatttgaggtccaaatagcatccttgctgcctagcactaggtgctatttgatatacccctccatgtctatacttggagggcactgatatatatattgatcacatagtcaaaatactacaacacactacattgaaaacaaagtatacaagaaagattctaggctctgtctgtcttgctccttatttccaatattgctttcgtggctagcaagtttcacaggcttggatcatccttgtaggtctcggaaggatatcctggggtgcagatttcaatattgcgcgctcctataacagtctatctatatttcaagcatcatgcatagcgaggcttatccatacctctacggtcacacaacctcatacttcatgtcaccagtcaacaggacatgggccctgcagttgttgctatcactgtcacatggctcggtgattgccgaagtactatactcaacctgacgtcgacatgtgcaactatggtcagcagacatagaatttaagaggcttagtacacatgcaataagaaacttcaagataacttatttcaatttttttcaatttcttctcaactgaatgctatcgacatgttttcggggtatgggcaaaaagaatgaaaagcaagaaagacaactatccaatcaactacaaatgccagaatttaggatttagaagcggataaagtcttgctgctgcgacaactcgccgctgtccacaccttcgatcagttcttcgggggagtcgtcgaatgtatccgagtcaacgtcgtccgaatcaatagcgtcatagttttcttcctcgctagactgatcagactcatcttcacccaaatcagctttgctagcagcagccgcagcagccttgcggatctggcccgcgcggtcaacatgcggcagctggcagcgctttttgtggcaggcgccggtattggcatagtctgggcactcgtggacgtgcttctcttcgcaggcgtcgcccttttcgcagtatcctagggttgcaaaggcgcggcagacgggggcaccgggtgtcacgcggacgtgggcgtagcgacattccgggttggcgcagcgtcctctaaggaaatgcatacaagtgggggagcgatggggcgaaggctcatgggatagatcacagctactacctgcggcacatttgcctgtctggaggaagtccttgcacatagcgaccttactagggtcatggacgaattggcaggtcgggcctttgtagcaagtgcctagaaaattagacgtattagtttttgagcatacttatagggtagagcatagaagtatggcccgtcggaaaacaaaataccggttgttgtaaatcttttgcaaagctcatcgcgcttcttaacagtatgattcctattgcaaggttagtataaaggtaaccatcattaaaaccaagactcacttcttcatagccacagcaccgagacggtggaggtttccgtttttgcttcgcacaaaggacacatcggcaactgtgacgcgcttaggcgtactgttggcagtactagggtcatctatgaagggtaagccaattcgagaggaagagcgaagggtgcacgcactcgaaatacgaatcagtttgcttccgccatttgcgaccctgaaaggaacatcattgacaagaatctgatggccagctgcaggatttgcagcggtggagaccactgcaccagcacctggaccctgtgcatatcgaagtactttcgctttttcatactctgtttttttctgttctctaagcttgcgcgttcgttccatatcctttgtcctgtcctgtgttttccgatcgtagacagcagggttgatcagctgcatgtggcgatcgtgcttcacgacccaaccattgctagaagatggtgtcgaaaccgccgcgctgtcgttcgcactactcggggcgggtgatgagttggcgctaggggtcgaaccagcgcccgcggtgttcaaaaccagcgtgcggtgtcggtgcggagcagctgctccacgacgtcctcgaccgcgtcccctgtagtatggggcccatcctgtgtgagaagggacatggcgagacacatattgagactggtagttagctggctgggtctcttgcgtcttgtggcggtttatttggccttttcatgttagctttgtcttgacggtgaactgatactgagcgcacctgcaagctgaccgatcttggccaggagatcgtcgttttcgctcatggtgactaactgaagctagatagggtaagtgggtggcagaccggatatctgagattttttcagattaagatcagaagctgggtggtatttcagaagaagttctgagccggtgatgcggaggaagcagcaaagacgcgctcatttagcgttggtgtgattctgggagggtagtttgtactgtttgcatgggttaggtgccttaggcatgaatacaaagtggcgaggaggtccgtgcccgggatgagaacgtcaccaaccaccttgaacagtacgaaggagacaggaaaacacgtcttcgatgcttgtgcagttacatgaggccaaaaaaggactcgctttagcattagaacctaactttgaccttaccggagagcagctccacgtccaacttgacaatcaccaacgaattactccgtaccccgcgtacaagtacagaaaagttaagaagaaatagatatagtccaataatagatcagaggcttgttaaatacactcgatgtccacaccagggatgatcaagcaatgggcaagctaaggtcttgctgaaaatcatccccacatgctgccgctatagttcgcaatgtgtatactgttttatcacacgcctactaggagatctgaagtttacaagaaagccaatcgaaggcgtttagaagtcgataatattgggcaagaattactggctcgacgtgcttacgccaataaccaacaagaaatgcatacgattctggtgagacagcttggtcaaattctcagaggctggtcactgcgaatcctaaagggatttgtcaagacatcaatcgaagaaactgtttgggaccaaatcaatgattgtgtggaacccatttgtcatttcatttcattttattttcgaattgaaccaggactcccggtctttccttgaaagccttaacgccaggacctgcttatgcaatatatcgaagccgttatctgggtgtatttgtttaaacgttttcaaattgaacatcgtcctgatctattccagaagctggatcgtcctctgactcgtaaggatcatcggctcctggtggcaactctgctttagcattgtccatcgcattagagtactgactgtgggttgcctcgggcttcagttcccaggtcatagcgaaatcaccagccttgacaaggtgtgcaaccatctccaaagtctgcttgagatatgcctccggctgtgccaatcgggctttgagtgtcttaaagggccagtatttgaattcgcggaagcattggaagataagatccagaagctcgttttgtggcatgcgggtggacttgttctcttgggatttccctttggaaggtcgtgtggcttgctgtagacgaagtgagtaatctagcctaagaaggaagggaacttccaaagacttaccacaaattgacccctttcggtgggaagagcatggcgcgcctggatgatcttcccgggaatcttatcaatgaagacagtttccttgcgaggtttcagagcttccagcgctcgcttctcggatatccgtcggaattcttcattctccacaggaaggcaattgaattcttcactgaccgcgccggcgagggcagtgtgttctaagaattgtgagcaaatacaactcgccaggtatgcagtgggacatacttggtatcgtctttcgcacataaggctcccatcttttgccctgttcccgccgcttcgcttcacgtttttgggcttcgtatagaaccgagcgcgtttcgccgaatgtagccatgcggttctcaacaccggggatgtccttctcggtgaatacgtacgtattgtgggtgaggtgtgatccagtgcctgatgggtcgaccgtttgacgctggagtgtgtagtccttgggaatctcccgattatctgggcgatcatgtaggcgcaagctgacctggcaaacggacacatgtcagaatccgccaggcaccctgcatacgcatgtttccacttactcttttgatgtcattcggtgtcccctccactctcatagtgccaagctcaatctcctcgtcatcgtccagatgggcccagtgctcccacagcgaccgaggcagacgggagagccacacattctgacctgcttgtgaaaagtctaaatccccagcatcttcatagaggtcttcttcatcaatgtctctcagggcaatatccttgctgtcggggtcttgtttgaagtacgggcgatccgggtcttgcttgacctgcgccatactggatgtgaggtggctcgaggacagtcggaatataggggaattgacggtgtgtcaaatgcgaccgtcaatgcgctactgaatttatcgggagagaaagtggtggatgtggtgatcagcgcgttcttgagcgatgaagtccgcgccacccaagtctggagctattcactcaacctgatgtggtaggcggtgagagctagcttctttatatatgacgacgtctgaccgttcagtattagagtgcataactagctagtaattcatatgctgaattgtgctccgaccatgaatgtggaattacttaggtggtattcttaggaatttaactgagcgaaatatagaaccattcttttgtcctaccagtgtcataacaatcatcatactcgacaaccaacctgctatgttgtaccaataacacgtctctactgtgagtagtggctattcgtatactacgaagatatataagccggttcctgcttgcatctttctcgtaatttctttattataacgtgtgtgattatgaaaaatggcgcccttgtactatgaaacatcgtttcgtcgcagtcttcacagttcaccttttcttgaattggagacgtacatctatcctcatttataaaaatcaaggctattcaagtccaattcttcaatggagtcattcaagccaaaccattcaatgaagtcgttcaagtccaacccttcaatgaagtcattcaagttcgcgaatagggatttgaaggatgaatcggcacaggtgtgggcttgaatgtacccataatgattttgatagtgggccgaggtactccattctggtgattcaaacgccaataccttctgtatgagatctctgtgactgagattcaggaaaggagccgcaggccttggcgaaagaagattacttgactgcatctgaatagtaagggctccaagcatgattgacctgcactcaaactcacagccccgactgccactcaggagggcatcgcgtatttcatgaagtcggaaaactgagtgattgatggcctcatgtctccgtttgttcattaatcctgcgatttaattagatactaagcagcttcagaatttgtctggccttaccgatgacctcatgagagatcggaagcccccaaccatgaacataagttttactcaatgacatgacagccgatgttgtctctttgaactgggaggagagctggaaaaaccaggaaacccataaccacaaaatcaaattccgagaatatgtcataggaatcttttcctccagattattgatccatatgtccgtcatgctatagacagattccttgcattcatagtaatccgctatgacagcaactttggcgagcatttcaagggttagctttcgcggtattcggcggtatttaccatgaatagcatgaagtagaatcaagagtgctccgatgtcccagctctctgcagtaatctccactgagcctttttgcagataaatagtgctttccttccaacccccagtgaggatccttttgaatactgaggacgcaaatattaaatgcttcgcagagacttgaatcttgacaagcggttcatagacttgctcttcagcaggttcttcggcagcaggttcttcggcagcagggtcttcggcagcagggtcttcggcagcaggttcttcggcagcaggttcttcggcaacagggtcttcggcagcagggtcttcagcagcaggttcttcgatcggtggtgatgcaggagatgatactggctcagaagaggaccgaatggctctcaatccttttctagatttcttcttcttcttttgcttccctgaataggttggtgggggtttgatcgcttctgcaggactctggagagaatgatcggaatatgaaacggtcatgccagctaccgtatctccaggcgcttgtgcaaaaggagagtttgcatcacgcaatattatgatcacttcaccgtctggatctatgatatgagttggttggtccatcatgtttatcaaatagactgagagatgaagtttctcttcgtaaaaggcagacaaaattggagactttccggggataggagaagatagaaggaggaggagattacgagagaagtcgggcagcaggtgagaaggtaggtatgcccaaccgacaatgagggggagatactgatgcacgtaggcgtctaggaatgaattgttgagaccctttctgccttaggttgataggacctgctccctaccttgtttgatcttacctttcttaatgaacacacacatacagcctatgatttcctttcccattatagatgctgatgatggatctcactaccgtcatcaagatctgtaactagcgtcatagagataaaggaatagagcaacacaggcctgaaagacacaaaggcagaaaaaaaagcctaccaacatacatgaagacagtcaaatgcctttgataccaaccataacagatctgtatcttggttttcttatggtctaatggtaaaatgtgctatattatgtttcacaatacagatagtttactcccaccatgcagctatccggttaaggtaattaacggcagtctttctaaccgccagtgtgccatatcagggtttgcctgcagtaatatatagtttgtaatataagtattttatatcccggaatacttctataaataagtcgaacattcaagtctaatcctcgatatgcttgaagtcttaccatctgaaatcttgatgcgaaaattctctcattccatctgtagttaaatatttatttcaactatattgcgattgcattgtaaaaatattgttgagcctcaaagtatcgtttgcaaaggtatggtactttactgaaccgccttgcactgcttaagcttggaacccatagaattatccacggcctaataataaaaatgtgtcaacctcaagcagttagtctacagcgtcaacatgttaattggtacttttcatctgggtggcagggtttcagtggtttcattgcggggcggatttagctggcgcttagctgtcgatcaccttctgctctataataaggtgcctgcttttcttaacagacgtattattactctaggattattttcttaacaagtctactattactcacatgacatcagtccaatcacgtattcagtaagactatcagcagacatggaactcgaaatgcgtccaagggcttcggggccactcagaatcctctcacttggtttgtttttttaatccccttggatagaaaatgagggttaataatatgcctcagatggtggtggcattcggggaatctcgagtctactgatcctagaaaggatcatggaaaggatccgcgatgttcatcatcttgattataccccacgcccgtgtgaccatttcgacttgatcgggggtacaagcactggagggtatgtctgtgtgtggtacatacagggttaatgtactaatatactataaggatcatcgctattatgctgggtcggctgggaatgaccgtggatgaatgcattcgagcataccgaaaggtcgcggagcgtgcttttactcgcaaggcacatgccattattccagcacggcccaggggagctttctctgcgcgcgcactgcaggaggctatcaaacaggtagttcgggagttctgcacagaaaaagaatgcgtggaacgtcggcgcaatggtctctctataactgactgtcaacactctgatctaccgtttcgtgagcagacatgcaccaaaacgtatgtagctatttaatgcagagattagattagtattgacaaataacagggttgttcttgcggttacgaaagtgaatattgacgcgggacctacgctctttcgcacatacgacaaatccactgcgcttgatggctgcgctatttgggaagttgcccgcgctacctcagctgcatccacgctcttcaagtcaattagacttggtcgagacaacatcgagtacattgatgcaggattcggctataacaacccatgcgaacagcttattgcagaagctaagaaggtgttccctggacgtagcgatatgcagactctgagtatcggaaccggcattggagatgtggtcggcataaaaaatgggcgcctgtcaatcattggtgcactgaagaggatgactacgtcccccaacagggtaaacaccaacatggaagactaccatggcgacagcggccagtattttcgattcaatgtgcaacatggccttggagatatctctttgtcagactggaagcaggctagcaggatatctgcatacacaagcatttatctctccgagaagtccaaggatatcgagaaatatgtgaagacgtatggggcaaggagtcaacaaaatgagctgaatgaacctcagtttacgaagattctaatagtcgaccctgttcaaaaagttgacgtggttctaggcaagctaaaggcctaccatatgatcccctttgttgcaaatgaagacttcactggacgtgagattgtactaagcaggctgcaagaaaggctctttcttcaaaagaccgcccgtaaagtggccttgtacggaatcggaggcattggcaaaacccaggttgccttgcactttgcctattgggtaaagaacaacatgccacagtattcaatattttggatcccggcattcagcgaagccagctttgagcaagcgtgtacgggtattgtgagagacattggtatccagagaataaagcaagatgaaaacgatatggagatggttcgtcggtatcttagctccaaggaagctgggccgtggctcttcattgtggacaatgcagacgattacgacatattatttggaagcgacggtgtgcgaggtcggctttgcaaatactttccagctagtgacaccggcgttatcttgcttaccacccggttcagtcgggtggcggaatgtttcacgtcacagagagatacaatccaactcttgccaatggaagcaaatgaagcgattgctttgttcgagaaactcgtggcaaatactctcatccacagtcgaaagatgacagaaaagctactcgaagagctcagctggctgcctttggctatcaagcaggcagcttcctacattgaattcaccaatgtatcagtttcacgttatctcgatcttatgcatggtacagacgaagacaaagaaacccccgcgagttgtcattttcatgatgatactcgctacccgcagctgcagaattctattgctcaaatatggcgtatctcattcgaaaagatcaaaaggtcagatcctatcgccgctgatatactgcagttcatgtcttgcattgcgccgaaagccattccacggtctctcctgcctttgtacaaatcggaagcgcaaactgaatccgcaatcaatacgctatgtgaatatgcattggtgaccagagggacagatggagtcacgcttgaaattcacgatatagttcagctcgcaacgctatggtggattgaccaaaaaggcgaagcgttagagacaaccaggaaggtcacgcagcgtatggtcaagacattctcaccgcggggccagaccaatgaacatacgaggagggcgtacgtacctcatgctcttgaacttcttcgtaagacagagggtcgagatatacacgaacggtatgagctcatcttaaaagttgtgtcctgcctcatagatgatggtagggtggaaacggccatggaattactgaaggaaaaggccaaatgggaccaaacccgccattgtgaagaacatccctctgggctgagacctcaaacatttctcactggggcatatgcagcagatgggcagacagaaaaggccatgaagctgagcgagtatatcgccccggcgaaagagagaggaatgcaagaagctcactctgagcaagtgcttccagaatggtttccagcgcagacgagcaagctcagaaagcagcagagctcttcggatattttggcgagacggaattatctgagacagcagagaaatcagtcagcaaagcgcgccctaacctacgagagtgtcagcctcaactcgaaataccttgtggacagctcgggagattacgcgggcgagagagtcactcaggcatgtggttatgatcgggcagagacattccgcccaagagggattcatctctactagaatctcactgggaaatagtatttttgtatgacagaaggagcctatataccacttggaaaaatggggatttgtttgtttggcgctaactaaaggcttcatttaaaccacccaaaaatatggccatacatgaatttgtatggtgctaaaagcttcattttcatagggtcatcggacctggttattccgtgccggcatagtcactgtaaatagatacagaaaagcggtaaattcgggcattaaagcctcaatatcttgaaaatgcccttcgtagataagactaaaacacttatgtaggtgtgatacgactaagaaaccaactgaaaaaagttgcagggttgcacatcaagaattctgtctagctatctaatagcaactggcccgcagcagcttcttaggtagcacactgatcatatttctccccaagtcccttcaaaacgaccttcaccaagccacctaatgtacctgctcggttgatttccactgtaggaatctccacacccagagacctccgtagccaattcctaacctctatagccatgagggagtcaactgccatgcccgccattgcttcaatgtcatctgcagaatctgatccctgatcctgcatctgccctgtaagattatggctgataaatttgcctagttccttcatcaaggcgacctcagtctctctcttccccgtcagcgagggatcagcttgtatctgggcaaggagggcctttaacgcatttgcatgagaggattgatccccaccactgccagcactggtagactcgaggttggggtagatcaaaaaacgagcgtcgcgtccaccgaggaagatttccttggggacatcaccgcggcgcctcgtgtgcgcaagtcccattgcaattgcaccactcgcattagaatcactgactggggatatattgatcgccgcggcgagtccatcaatcacttcagcttcatggagcacatgcagcgcgattgactgtactctttgaaggaatcgggagctccgacttgcggcacctacatctccaaccaccccgaggtggaaaatagaggaagggagcccctgctgtcgtcgataccgggtgaatgcttccaaaaatgtagttgctgctgcataattggcctggccggtgttaccacataccccggcaattgagccaaacacgacgaagaaatcgagtgagtactgcaatgtggcatgatgcaggttccaggttccagtgactttcggagccaacgcagcctcccactcctcgtggctcatctgcaggaacagtcgatcctagatgctatattaggaatggcatttaggagaaagggagaaaaacacttaccttcaagtcaactgccatttggaggacaccaacaaggggccgcgtgcatgtggcaacagcccgcttcacagcttcaagatcggtcacattgcctagcacacagctaacatgacaaccttgcgcctcaagctccccgataaatgcttgatcctcctcagatttgccagctgatcgcgagaggaagatgagctctcgcgcaccctgctcgaccatccatgttgatacggatcgcccaacaccaccaagcccgccaatcagaagataagcggcgtctgatcggaatgtcgggaatcttttgacgataggaggaggcaaactgtccacggaggatggcatacgcaccaagatcttacctaagtgggtgcctgcctgcatatacctaaatgcactgacaatgtcgaccgcatcaaagactttgacaggatggataggtccgattttcccttgacgataccaatctgaaaatgttgccagggtgctgtatgtgttagttcagcttttgttcactcaaggctcatctgagacaaaccttttgagaatctccggggtttccttgcaaacttgtgcgaggtcaacaccgaaaaatcctcggttagcttcgaaaagactcatattaagtattccgtgacttatgaagtcacgttttccgagttcaaccatccgtccgaactttgcgacacattcccacgaagcgtgcagtaagtttcccgacaaagaattgagtactacatcaactccccgtccagcggtggcacgcattaggtccggttggaaggaagtgttgcgagagttgaatatccgttctcgaggtaaaccaaaatgctccatcaaatgggctacctttttatcgttgccgaccgtggtatatatctatattgacttattattagctccacataaaaaaaacgataacgtgaggttgacctacctcggcaccaacagctcggcatacttgcagagcggctagcccgaccccgccacatgcggagtggatgagaacggactgttttcatgtcagtaactaccaatagtcgagttaaatggtgactcgcctggcccttcttcaaagcaccaatctcaagtagtgaatagagaacagtcacataggctgttaacatcgtggccgcatctgccattgacaacccctgcggtagcttgatacaagcttcttgaggcacaacaacgtttgagaccagaaccccagaatgcatcaagatgacacggtctcccaccctgatatccgtcacatcaggtccaacttgaagcacaataccgctgccttcgaggccgagatcttctttgtttccgaaaaagcccattgcaaccatcatatcctagaatatattgatcaacgatatgcaaggttatcttgggcgcagaaaacttaccttgaagttcagtcctacgtagtccatctcaacttcaacatgcccctcattcaactcatatgatggctctttctcggcccagtgtattgtatccagtagcccgtacgtcgtgagagttagctttcgggacgcatctgatcgaggtggacttgcgagctgctcgacgagaggtgtccagtggtaccggccgaccttaatctcgccttcatgcaatgcaaactcatactctggataaggaagggagtgcgcgcgggatctttgtatcttctcgcacacttgaattacggcctttgcacccgctgcatcccatgtggaaatctccagaattgagagatcaattaaaagctctgatcgtaaagtgcgggcgaacccatggatgaaaccgaacagtggatctgagcaggtgcgggacgttgactgcgtgacccacaggattcggcattcttgcacttgctcaatgtaccgttggaataccccatagtcattcttcggcaagcaacctattgcagctccttcaagatctagcagagacacaatgaatttgcctttgggtgggatttcgtgcaaggtagtccagtgagtggtatagcctttgtcgcggaatagcaattcgacatcactcgcccactgggacgggctagaatttcccgtgagcaaccagatatcggtaggaatggatatatcgtctaccggccgtgacaccatgctggcagatatatgatatggcggcttttgatcataagctgttacatctgctccggtgaaacctgctgctcgtagctcccgatcccaccgctcgggtgagatgtacggttgctctgctcgaccatcatccacccctagccaccagccggtaaatacaccctaaaatatgtaagaaaaccagatattggtataaggaaaatttggtacctaccatggtgaaatttgcaattaagatttctgtatcctagtcagtttagtcatctaagctggagggatttgacgtacccgggctaatctcatggagtaagaagcgaccggtgggcttcagaagacaatgcacatgagtgagtgcggtatgaagactgggggtagcgtggagaacctggtagagaatgtgaattcaacgttattgggttgaggcatactagtcaaatacccacattggaagcgatgatcaagtcaaagctatgagggtcaaacccttgttcgaggggatctagggtgatatcaagaactttgtattcaatgcattgttcatgaccgaatctctcggttgctgcagccataaaaccagaagagatatcagtaaaaacatactggctatacatgcgctccccactcgtggacttgagaagctctagagccaaggcagttgcagacccggtgcctgcaccgatctcaagtattcgtaggcctgggttggaatgacagagcgacggtaggaacggctcccaaccggcatactgtgtgtgcgcagcatggaattggtgcagcagattgtccttcatgaggacctccaatgggctactttctccagatataaaggctttgcagttatcgaagacaacctgcatgcaatccgcaagtggagcatcaaaggtaaacttggtttcggctaacactttccgtgtcatttcctgtctgtctgccgagcttagcaatgcccactgagatgaatctgggtagattgattgttgtccactttttttgatattagaagctgcgtccatgatgaatttcttccactttacgaaatgtgatgatcttggctcgaaatcccgaatttgctccgcggtctccagaacaaaaagcgcagatagctgacccaaggctttaatattcatagcctgtgatgtataatcgtgtggcgtagacaaaagtgctgatgattgcaagaaatcaatatccgatttccactcaagatgggttactgagcccgcgggtccagtttcagaatctatattatcattttccaaggcaaaaagataagctccttggatggagagcaccacccgatcgtcaagcatggcaacggcatcgcccaattggccatcccttgtaccgctcttggtccgggcacttgctggcataggtggaccacctggtccgacgaacaaggaatctatcatagccgggacataaattgttgtgaggtgtcgcaacaagccctgagaacaggccacacccatgagttggagacattgatcaatcgccgtgggatgaagcgaatacctgctcccaggcagcccacgattacccagaatggtcgcagttgccctcggtccagtaggatcggctgtaatcttttccaagccctggaactgagggccgtaatctataccgctcctttgaagtactcggtacacactttctgatggcaaagctcgcttataggaagatattgggaatggctctgggggatgatcggacccggctcttacttgaccctgacaatgcatcgtccatctttctccatcatgggccatgattttgaaactataccagccggatggaaccctgtcagccacttcgaccggactgaggctagtcacgatctcgatttggtcttcctcatggaacagtagtggtgttataaatgtcgcattgcgcactgaataactatcgttgtcaggatacagctgctggactgcctcacctaccatagcgacgaacccagcgccagggaatgtgacggccccttggattacatgatccaaaagccagggcacgtcgtccagcgtgaccagattacgccaagaaggctcatgatcagtcgtatcgacgacccgcgagccgaggatttcatgatgcggaaacttccgatgcctccactccctactcagtcgactctcactccaataggagcgatcatgttgccaaggataaggtggaagatctgtcagcgtattcccgggctcaattaggctcgacaaattgaatcctacgccgttcgcataggcctgtcccgctgtccggagtagctggctttggacatcctcgtcatacctaaataaggtgggaatatagactggtgacttcgttgcaagagtccggaggatttgtcgcagaggggcggcgagggctgaatgcggcccgacttctaggaagactggggttccactagtaggtaggctttggatagcctcggtgaacaataccggtgattccagattctgtcgccaatatgatgcatctagtttgcgagggtcggtgatagtgttgctagtcacactagaacagaaaggaagcatttcctgctcatattcgatgtggctagagatacaatgttcatattcagagccaatctgtttcatctggtctgcaaataatgtaagcgcaagggtaaaagcgcagggcacagggggggtttaccagaatgataggcgattttaactgtaagccgccggcagagtgtatctgagtttgctgtcttgatgtttttggtcacatcgtcaaccgagtctttatcccctgacaaggtgacactatgcggactattgtggcaggctacaaccactcctggtgtcaggtacagtgccacttcgtccggggaaaggccaacggccaccatagcgcctaagccttctagcggtttagcgactttgcctcgatagtatgctataacgatagcacttctcatagaaatagctctggcagcatatgcggccacaatctctccgcttgaatgcccgacaactctagatggctcgattccccagccccgaagaatatttactagtccaatttgaagcgcaacacagagaggctgagagaactcggcttcgtggactcgagaaattgaactctcttggcttagttcatctggaaggtacgttagtgaaaatattctcgtaacttcaggggtgaagccctctttctgaccatataataaccaattcgggggatcaggtagctgctgcaatgcttcatccattcttttgatatcttccttgaatgttgggaattcagacaagagctttagccccattccgggccattgagcaccctgacctgtgaacacgaaggtgacatttggggaactggtgttaagaattgaaaatgccgcatcatctatcgctggattactcggctgcaccacagcgaaagcccggtgggaaagatgtgatcttcgcgcagccaaagtgaacgaaagatcatgcaggcggtctgagtgattctttacatagtcggtggtctggctgatacgcttgcgaagagtgtctgctgtgtgtgcagacaaaactaggagctgagggctggaaagcccgagcgatgtgggttgggactttggagagaccgaagaggcggactccagaatagcgtgggcattggatccgccaataccgaacgaatttacgctaatcctttcgggcctgccagcaggccacggggtcggctctagagggacatgaatatctgcctcggtgaatggaatttggggattcggcgttttgaaatggatattgggtgcgatggtcctgtgttcaagtgacaagattgatttgatgatgctagtgatgcctgaggcaccctccgagtgaccgacatttggtttgacctggtgtacaacatcagtaagtggtttggctgtagacagttctgcaaatagggaatactaacagcactgatatatgtcgcttctcctcgggtcatctttgcaacgactgatgcttcgatgacatcgccgacggctgttccggtcccatgacattcaaaaacaggtgtttgctgtatcgcgtcaattcccgcaatccgatacgcgtgacggatcaacctctcctgagatattggacatggctgcgaaaagttaggggtcttgccgtcgtggttgctcactgtggagcggatgacggcgcggatcgcgtcgttgccccgaagcgcgtcgcgtaaaggtttgagatatatgcagttgatcccttcaccacgaccatagccatctgcctcagcatcaaaagtatgagagataccacttggtgacaaaaccatatttttagtcatggcatctgtcatggttgggctccatataaggctcgtcccgcccaccagagctgttgtgcactctccagatctgagtgcttgacaggcctcatgcaggcagaccagggacgaagagcaagctgtctggatggtcatgctgcaaggggtcagagacttttgaaataaagacagcagatcgcactcacctcggacctaggagatcaaatcgatacgacacttggtttgctaatgcataaccaccggttgcgataggaaatatctgcgtcagatgctggggatctttatgcgatatctctagccaatcttccccaaaaccgccaacaaagcaaccgattttctcgccgcgccacttagtctcccccgagttctccaggcactcccaaaccacctccagcaagagccgttgctgagggtccaggcgcgccgcctcgtggggagggacagaaaagaaggaagtgtcaaaacaacctggatcttcttgcaaaaagaatcctcttttcgttttgctcagatctccacaatcggcgctgctagacgcctctcgggagcagcgcgagggaggtgcctcacaaaagccatctcttttattcacgagcatttcccaaaattcatctccacatcgaacaccgcctggtagccgcattgccataccaatgacagcaattgggtccccaaagtcctcctcgtgatttctgcatgatgtttgtccttgtccagttattgaattcatttttggttgaatgatgaataatttgagactggatcaagatggctgcatagcagacaaagcaaaggttgaactagggttggagctctgatatcacaaggtacggccttttgacgatcgattaatttcacgagtagattggcgattaagcaaatctacacacaatatgtacctacatacccagctctgcaagatgcaggaaacacatttcctccgaaatcctccgccaccggaggaatgatatgtacctgaatggcgactaggtcgtatttccagacactgcaaagaaaggaaaccggcaggtagttccaacctgccctccgaaaacagggcattctcaaccctgttcaacgctgctccaacttagactcgcaaatgtgactgcaacacaactagtcaccgaccttctatctctatatcacttgccatattgaagtaagtatatccaaggctacgaattgaagaaaaaaacaagcagcctcattataggcgacgttcttgttggagatcttaagcttacatgagagcaaagctcagtctggccaccaggtggtggttcatcatcactgagatatattgtcacaaaggctagaacaatcagaaggaaagctcggcccaaaaaagcttacaaccctccgcatgtccaacccaatctcctaccttccgggtgttcaccgtaacccaccctcatctaggtattgggtctaatgtggcacacagaatgtacttcgtgctaaatatactgttagacacggcccagtacaacccaatgaccctcaaggggtaatgatctaggtcggttatgtcgtcgcattccgttattcggaattaagaagcgctgtggcgatctcgactatttgttccgactttattgtgtgctgatatggacggtatcttattttgctcgacgcagatccggatatttacgctttgtcaaggggtgagacacttgaagcttccttaaaactggtcagcagtgaatgattctatgccggagctggccgtgtgaacgaggcccaaaagcaagataatgatgtatcaccactctacaagataccgtggcttacaaaaatcattactggtaactgctggtgagattttgcataagtctaatccaatagtacttctatcctcatccgattgagaactatccaggccacccaggtacgttgtctggttgtcctagaaaatttcgttagtacaacaccttctatgttaagatactcacaacttctaaccaggagcagcaaccgaattttaaccaagatggacagcgaatggtttcgaggacaggtcgtcttcgtcacgggggcaactggtaacctcggcggctgcttgttatacaagctagccattcaacttccaaccgcgaagatcttcgtgctggtacggggatctgtccaaaaggcaatcgaagcatgggagcagtcaatgccagagcaagtggaggatgttatcgccacttgcaagatccaattcttcctcggtgacatgacccggcctaacctcggtctttcacccgccaacctatcacgtttacgaaatgaggtcacagtggtgatcaatactgctggtgacatcgctctctctcgggatctcgcagagactataccagtcaattgcactgctcacctgacactagctgctctactagacagtttcactcagctgcagcgtttcctccacatatcaactacatatgtctccagctttctccctgacggcgtggtcaaggagcaaatataccccctatatgaagacccggcagaggaactagagaagattctctccacaggaaaatcatcttatacgaaacaattcgcggctccctacgcactggccaaacacctggctgaatgtttgcttctgggtggtgaccacaaatttcccatccttattgtgcgaccctgtctcatatcaccagctattgcggagccctacccgctctacggcagtgatggtgcgatacctgtacattccttcctgcagatactcctaggagacgcggaatatggacctctgaagcttgagcagacactacctttccatgcagcctgcaatgagatcccagttgacctcgtggctcgtacttgtctagctcatgttgcccaaggcacaactggtgtagtccacgccagcgccgatctttatgtctcccgttcgattggggacctgctcgagcggatgcgccgccatgcaccagagggagccgctgatcaggtacaaaaggctgggattgaccatggagaggtcacggcccccgagttttacaccatgatccagcaatttgcacgagactggaagattgaatgtacgcgatctgctcacctacagcaggtggtgggtcccttgggacttgaccttggcgatcatgacccagagatattctttaaacttcgtatcgagcggctggctaagactcttctggaaaagttggaaagtgctagcgtggcaagcaacaaggtctatccgagtatctcctgaggaataatgactgggctttggtggtattattctacatttctcgtcattggttgtcgttttgtattagagttatcgcatctgtggtattttcttaacaactcatattacatggttcgaagggctttctcgcagagtcgtgctaagtctagattccctttaaagagaggaaaccaataaagcgtgtaataactacatgagcttcctattgttgagtgtggtgatatgggtgttgttgattattattctccctgagcaacggtatagaatatctcagcattcaatgttcaatgctttgtgcggactcaagtatcgagagagagcttgaggtatgaactcggggagagctcgggtgtgacttgtttggtcacggtctagtgtccttcatttgctccgatgagattgtgaccctacgatgttcgaaccgcagttcaaggaccggcaagctacatgcgaaagaaaaggtcacacaagattagtctggtggtatacgtagtatacattccaacctatgcgaggccagtggccgaatgcctgattttgtaggattgatgacttaatatgcctgaattcttccttatttccagtaccgtgcgaagatatcgaggtcttggccgagacgcagatctggtgaagaatggggggttcaaaggtgtgaatggcttcaaaaggaaaagggaaaaagggccccaaggttctttaacagcagctagcctgaaaacagtttcctcgttgccatagggtagacgcacctcgctcagtatatgagacatcagagagcctactttttagggcgggctctacataaatgaggcttgtgtggtgtgatctcagtgtcgaatttagtctagttgtaagttgcttctcttattgtagacctgtttaaatcttctttctgtgatgctctctttgtaccctaacagatgcagttttacgcctttcacaaacagacaaaagtgaagtaaaactctgcctttgcctcttcatcttccctccatttctccttgtcttcattttcatttcacttcatcatctctcgcccttcattcttatcatcctctcccctttatcctttcttctcctctccacttcttataacctaaccatgaagggttcgctcgcaaatgagccgtcgatccagtctagagtcgatgcgattatgctcactactctgctcggctaaagcgagagtacaacaatcccagtttgatcggatctactgcatctatctccagtatcaattccgtcaactccctacatttgcaatacaaattcgcgatcaagtgtgagtgggttctcgaaaaggaacaagtcacggttcgtggactattctcgtggttcagaggggctcagaacctagtcactaatatggatatcgtagaagccaaaagacttggtagggtcgagggggtgttccaatgtcctacatggtggaccacagtttgaaagaaaaggctggggcttctggcacgtctgtatacggcatcgcttcgggcagctacggtgatagtttattcatattcgttacaacgagaacctcactggcccacaacgaccaactcaatgggacgatgaggtccgcacaatgaacccgagaactggatgactcataaatggatgagaaactatatatattcgtcttgcctagagataagaatcctgattcctcagaagcgaagcttcctgcccaggttgacgcgatggttgtatcggtggaaactgtcctttcctagcctgcgtacaggtcccgagtgagtaatgcgcgaactaccacatcggcggccggagcgaacaaaaggaaagacacaccaaaaccgcagcctatccgaagccttgaaggaacccaaccttggaacgcacacactatgacagtacggccacgtggacctcgggcctatcccgaggaccggtagtcattatctgccggcgcacgtgacggagaccttcccgcaacgcggcaagattggcccatctcccgtctaacccactcatctccaccaatacccgtacgtcaataatccacacggggcacgccattcgtcggattacccatgtcgaagccaacgaataggacactccgaaaaatcaaaacagcatatcagttgcatcactatgccagagaccggtcgcgagtacatacaatggatcatcatcatcttccccagagcttacacagtgacacacacgcctaccatcaaccacggatcacattctaacggagctctggtcggaggccgtgacttctggatatagacaccgaccttgtgtcgctctgaggaatgatcaagaacgacacgtcaaaagcattcgctggtctccgagctcgagcatccgctttcacatcatttcctcttcatatgttagctatgcggccggagcaagagggttgaaaccggagctcagatatgatcctggttgagacgactgaaccgtatagcgaggggaaatcagtgatccttgtcaacgactacaaccagctaaaggcattgacttttgctcgtgctgtacaatacaacgcttccagccagagatctgacctggctgtcttttgcacacgtttcaatttacttcgtatcaccaaatgtgccattttataccttcatgctgttcttatgagtgaccctcatcaacgaagcctcttcttgggcgagaggatttggatttctctgaagctcatccatgctggtctacaaataaggttggagagatacctagttatacagtcgctatgataaggtagtgcacgttgggtgtcacgattggcacttgcgggactcgtactttcccgtttggggttgtaccgttggtcgttccttcccgttcgaaggaactcgtttgcgcagacagtcgtaccttccttctgggagaagcgagaatagggctatgcccccgaaggggtaaaaagacccatttgttatttttacgtttgttttgttttcttttccttcttcatacttgatattcgtttagcaatgcacttcttctgctagaaagaacctggcacgtaacattggggacgagaccggtgtgcagagctgggttcaacaagccatgggtcaaattatacgtctagtccaccgattgaggaccccttttcttctgtcagatgtggcgatccaggtattctaccaaatttgtatccaaacccacacaaaacttcgttccgctttattggagatggtggtctaagtccgccactcgggcataccatttattaattattgcctgtagtcaaaatggagtatcccatgtttctttcctcgttctctatgaatacctcaaattcacttatcccctagctcttaggctgtatgccatattttaaaccttccatgtccagatgagagggccatgaacctgagaagttggtatggcattgagctcctagtacctgtcatgttctcacgatctgtatgattatccctcacgtgactatagatcgttgatactttccaggtcacttggtcgcttcttgtttgctatttgcctctttcctttgttcttttgtttgttctttccttcccagggttgtttgcactcgagctaagcgagtcgttcgagttttgcatcgtttgcagtaaatccagctatataaacaggtcgattcccacttctgaacttacttcttctctctctcttcatcattttggatcaacctaaccacatccaacatgcctacctatcgtgtccatcatccatcacatgacttgtctattcttatattcgttcttcagacaacccaaccaccttctaccttccaccttccaccgtctatcgtccatcttccactttatgaggtttgtttcttatctgtgctatcacatattcttcatcttccatcattgtgttctataccttggttaatacctgatgacatgaggctgactgtactagatatgtgctcacatccacattcaatcatccacatctaaattccacttcaaccaaccatctacattcgactactacaatgcttgacctgaaagagaaggaatgaaaagaaacggtcttgatcgacagagtctccgcaggagtgtctctgaaggagacttctcgtcgggaagaggttacagcgtgtacccatttaaaggagactctcaagaccgtttgctgtggtggtaaaaaaaaaatggtcgcctcgacaagcaagcatcaacattcaaccatccacttcaatcaaccatccaaatccaagcgtctatatccaagttccacttcaaccatctaccttcaagcaaacatccacattcaatcaatcacatctaatcaatcacttccaagcatccacttccaagcatccacttccaaattctactgcagtcaataatccacttcaaccaatcatccaaattccatttcaaccatccaccttcaatcaaccatttcaagtatcctcgctcagccttactgtgacgggcttaggcagcaaacacaaaagcaaaagcaaaaaaagaaaaaaaaaagaaagacaaaagaaaacacgtcgaatcattccaatcaaccacatccaatcaaccacatccaatcaaccacatccaatcaaccacatccaatcaaccacatccaatcaaccacatccaatcaaccacatccaatcaaccacatccaatcaaccacatccaatcaaccacatccaatcaaccacatccaatcaaccacatccaatcaaccacatccaatcaaccacatccaatcaaccacatccaatcaaccacatccaatcaaccacatccaatcaaccacatccaatcaaccacatccaatcaaccacatccaatcaaccacatccaatcaaccacatccaatcaaccacatccaatcaaccacatccaatcaaccacatccaatcaaccacatccaatcaaccacatccaatcaaccacatccaatcaaccacatccaatcaaccacatccaatcaaccacatccaatcaaccacatccaatcaaccacatccaatcaaccacatccaatcaaccacatccaatcaaccacatccaatcaaccacatccaatcaaccacatccaatcaaccacatccaatcaaccacatccaatcaaccacatccaatcaaccacatccaatcaaccacatccaatcaaccacatccaatcaaccacatccaatcaaccacatccaatcaaccacatccaaattctacttcagtcaacaatccacattcaatcaactacttcgagcatccacattcagccttcctatgaccggttttggcttcatgacaattgacaggcttgctacgacagcaaacacgaaagcaaaataaagaaaaagagaagaaaagaagaattaaaacacatcgaacgatttcaaacaaccacttgaatcatctacattcaaacagccatttcaagcatccacattcagccttcctgtgacgggttttagcttcagggcaattggcaggcttgcaacaacaatacaaaaacagaaaagaaagaagaaagaaaatacctcgaatgatttcaatcaactgcttcaagatcctgcatcctaaaaaccacttcaatcagaaatcaacattaaaccatatctacaatgcttcgaccttgaagaggagaatgaaaaggaacggtcttgaaccacaagagtctcggaaggagtgtctctgaaggagacttctcgtccggaagaggttacagcatgttcatttaaaggagactttcaattgattcatttattgattctacctgagtttaattcttagctgtggtttatgcctataaaaaagactatgtaaatatgctatacaataggctgctacaagggatgttacgaatggagccattatctcttggccccaaatcctcggctttcccatccaaataaatattcagccaatcttgtcttatagtgaacgttatgcttgctatcacacttcgattatttgtacatagctaatctcaaaacagctaacacatacagaacgagccgctcaataactccatcactaacccaatactccaaaaaatgctaaagcaaaccactcagttcatcttgacctggaacaaatagcgctgtcggatctgcgcaacatcatacacaatgtactcattgtagaacaggccacggttttcagataggtgggtgctgccaatagccacatcaggcatcttcacaccctccaaagccggattcaaacatccagcatccttccatccaccaggaacgttcaagcccttgccgagtgtagcaattttgccagagttgcgtgcatcctcgccagcgttatagttgctatctacaagttccagcatgggtgcaccgagctcggcatcgcagagaagaagcaaccccatcccccggctgttgtaggcacaacagtagtttgcggatttgctcgaggtatctgctaaatacacacccttgccgaacatgtagccgttgacgggtgcttcgggcggcgcaatgcgcaagccttggctgaggataccaccgaagtttgtgctgcgagatccatgccagaggaggcggcggtcgctgtttggaatgctggcatagggggaggtgttgaagcggtcgttttcgccttggcgttcgatacggaagatgttcacgaccttgtagctcatgttgtgtgtgtcgccgcgagagttcttcaagtagttctcgagttctacgaactcggttgatttgtggtccactgggcaaggtcagtttggtgtaaaattgtacgttccgcaatttatactcacgttcggtcatctccttcatacccaggctctggaactggcgatccagcgcgtgggtgtcgtcgccttgcttggacgataccatgatttcattggcaacgtccatatccgtcagtgcttccagcaaatcaatttccttcttgatctgcgcatttgtgttcaaggttgggggccgatggcggccaaagacgtgaggaatcaaggtgaaatatcggttgctcaacgtttctatggcatcattatatgattggccatattttgcttgcgccacacttggtgtaatcatcagctcggagatctcttttagagccgagaacccgcttttcaaagtccggtcgctcagcttcccaagtggtagtttgtggacgtcataggacattgcagccaacgtgtcgagagcatcctgtttgttgaagatgaaagacatgaggttttgaagtcccttggataaggcactctctacctcgggctggtcctcttcttccttgatggttttttccttcttcaccggctcttcatcttcatcgtcctcttcatagttgcgctcaaggaatgtgtactttccgtttttaggggtatcgagccgatccacccatttcaggcctgatttgtctctgaacttcttttcataatgcttcatcgcggctcctaaactgccctctccgaggcaggctgactgcccatgctccccaactcgaccccagcgtgtccaggtaaagtactttgagtttgtaccgctcaacaactggatacgatagaatttgttggcattgttggccgaaacggtctggctcagggtggcatcccagatcagaccggcactatcaatgtaaaccttgggatctgtgccgtgtgttagtctgtgacccccacattaggtgtcgcattgaagacttacccttgattttaccaaattccatgaagccctcatcgactgggacattaatcgtctttttggttgtcttctggatgtcctttgtctttttgtcggaaccatttttgacggggtcttcagtcgcgcttcgtttcttgcttgcgggcttcttatcctcggatggtttagctttgctatctgcaccgttcttctgggtgtcttgtgtttcagcgggagccgcatccgcacctcgcttcctagtaatacgcttgttttctgcaggagcagcatctgcagtcttctgtgtgtcgtcatctggctgcgacgcctggccgaatgaatacttggactccggcaatggtttcttcgcttcggctgattcaagaagccacgaaagtggaacaatgtggcaattggcgacttgggatgcttgtttatctggtcgattggttaataagagagccccgaggtcgtacataatatcgaaacatcgccgtagctattatcatccccaatgcggtctgtcaccgtttggagcattggggtgggagtatattggccattgccaaattcacaaaatatcaaacttccgagatcgtgtatgtggtagtgtactcacatttggtagtctgcttctccacatccttctcggtggtcactagatgggtacattcatccgtgaccgctgtgctgaaagtcgcaccattcccctcaataagtgtttttaagtccactaggagtagtagagtggtcagcatacggattttggtggaggtgagctaaataagcctagcgaatagggggctcataccctgtctcaggttgggaaatgtcccgcccacggtgatgacgaggtttttgaaacttcgaggtgccataatgttgctcaattgaaaaaaaaggcaatagggccaagtaccaagagtaacaaataggaatagaaaaggtagagattgaagaggaatcaagtacgaggtgccccccaggtgatgtgtatgtcaagggaaagagctaccaggcgggagctaacacaatcgaaaatcaatcaaaaggttgcaagctgggatgaaagtacagaggaagagacagtcaagaaaacatgaagaaacaagtcgtcttttaaataaaaaaaagacgagatgttgtcaaggtttgtggcctgggggatcgggcattaatgaggctgctgcctatgggtgccttggtgctgcctgagctagccaaggcagcacacccctttttgtggagaaggcgaggctgaaaagcactggacgcttaaaggcgcaatctacgcggctaatctctacgtaaactaatttcccagttccggactacccgtacacattggcgttaagggttcttctgctggcgatgattctatgcctagttcgaatactaatgcaaaatatttggtttaagtctagatagcatgtctgattctctgcggaatctaattttatcgagattcttcaagacataaaatttccgatttctactcccaggcgttttctcttagacagaaatgcatatcaacttattgaaaaaaagatcctgatacctctcttcaaacatcaccacttacacctcagtttgcctagtttaatgggcataattggatggatgggacagaactttgacaccgtaacagtccctttcaaaagctatctgacaatccggagagaaggccggcaatgtcatccaactgttgatgactaggatattctgtgagttactgtcccaaagaacctagacatgaacttgtttccccgtaaatataaggcagagatagccagggatgccgtctttgtcgaatcaagatcatactgatcctaggctcatgactgacagatataaaggataggaatgtaagaccatcaaaaattggatattgtattgtgcaagatctctgatggttgaactatgaattgcagggaatcatatatgacaaatgatatgatctagctagatccagaaggctctattccttaggttatgacggcctgcgttctatggtagcctgcatatccaggccaggataggagatagccctaactaattgatattctgggctttttgcactgaacccgacggtataaggcataatacaggacccagctctctaatttttggtgttattgctagaacaatgataatcagctacgaaagtgccagctgaaatgggaataatagcattgagtacggagtggtagttagacatgccgggctaatcacgatacgtaattcggacttgcccttttgggacacgaccgccgctccggtggcgtactgcttgttcccgcccccgagagggaagtgccccgcaacgacctgtcaacaagatgaacgagacatacaacgtataaatcattcaaaatggagctgactttcttgattagtcgcgatggaaaaaatgccaagaggggacatgcacggcgtgcgtgtaactcttgtcgtcacaaaaaggtgtcgcgttctattctagacagccctgcaatagtcggagtcggaggttaacttttctagaaacggtgttatcacaatacctccccggagcaagtagatgatgtgacttgttcacccatcttctctggtctcgcagatagccgacatcctgcacctcaagcttcaaggcgggatcgagcagtccgaaatagatctgcatctccccgatgtgagcgatcaggtgttccctcactccagaatccggtggaacaagaggccgaatccttcattggccctaatgcagatacacctgcagaggccgatcaagaatctcgtcgttttgcgtgtgattcaaaccctatagcgactctcatggaacagaacgagtcaaggttgcagggcggtcgatcccagaaaggagatgtaggtgcatggttgggcaccgatgagagttccattgatcggggcgagacccctgactcttcacaaatattgctagggacccatgttcaccccggctgcctgccttcgaaagactgccaacaggctttgatcgacatatactttcgtcggatacatccattactgcctttacttgatgaggataacgtgcgaagccaacacagagcgggaactctcgctgcgcgactactgcaggtgatgtgtcttgtcgcagcgaaggaccggggtgcggtgcctttcctacgccttggtccggattcaaatcccctcccactggagaaatttagcaacattctgtacactgatgctatgcaaaacatctcgagaaggcctgagaaaaaagtacttgcaatacaaatattggcgcttttgtcactgcacgaatggggctccactggatccgaggattgttctttgaatctggcccaggctatccaccatgcccagaccatggggttgcatttgctgaggccagaccaacattctgatacatcttccaggaatcttttctggtgtctgtggagtctagaccgatggaacgctgctatgaatgggaggcctttaatgatacacgacggagacagaagccatggggtggacgacgttatttcaacgttccgatcgccgtttcgtgtctggcttcgaattgccgataagctgggagaagtgattcacttctaccgaccgatcataaaaagcgtggatcaaagtgaactcgatcttccctcctttgaagaccttgtggagcactgtgaggcctgggacatggctccagacctgcttggtatgaaactttccgtcgtttagttgcaacattgtctaacccctagaccgcagagtccttggagcttgtttatcattctgtgattattctgtcaacacattccagcgggttgcaaggccgatcacagccaagagtgtcaaaaatccgacaaggtcattcaattcttaccatcgcgtcgctaagtttcaatcaggatattcggaatctagtgccgtttcccatgatcggttacaccgtctcgctcgccttttcagtcacgtacaaacaactcagagaaagcaaactgacaagtgcgcgccgcacagccatttcccagatccgtttatttcatcaatttctcaaggaaatgaggactacgtggtggtcggccgctgtgatgactcgtctaggccagcgtgtgttgagcaacattcaacccactgtagaccaggaacgttccacaggcccagaaatcgatatcacccgactaaactctgcacatgaatcgactcatatatctccacggcaacttgcttccactgaggatatgcagtcgcactcggctgccgacatcccgaatgtggggagacggattaatgcaggatctccgagcacacaccctctggccggtcatcaactgggaccggaccaacctttgaatctcgaagtagacagcatgccattcttaacagcaactgaaattgaggatttcgatacttttttcggcaatttccttgatgtcggttttccaaactgctcgaatgatcaattattgctagatctcgacatggcagactttgaatttgctcctcgcggtctagcttgagaagctgcacaaagatgagaaggcagctcggtttcaagtcttgtgtaagtacacattgagtgcgctacttgatagagtcatctgatcatggtactacagaggaaatatcaaactcatgagatgtgaagagaaggctacacactcccgctagaccacatttagtatgttttccgctggccgctgtttctgaccacgccatcgtcataaatactttatctaagaatcccgatagcctagttgtggatagcggccatcggaaaagttacccgaagtagcttagtggggagttttccgctgtatgatagcttcctcgtgaagagatgttcatgtatcaatcactatagtgtatgaaaaccaatcctatgtattcttctagtatctcaaggataaaataacatgatatattacatacttcagaagtagcagtcgtgtgatcatgggaaaatgttccagtatagatcaaggaatgtacccagcatgtcagaaaaagcttctgaggaccaaccttgaaagattttcgcggcttactgtaacataggtatttagacagcattacaagaatgtcggtatttccttccgcggtgaagagctgcgcttgtaggtttgagtccttgaaatcagttcccgaccccgtttaggaatgtccgctccgttgcgcagggacgagtataaagacagacaatgtgccatgatttcccgtgtaaatttgccagacccgattcaattgagttcatattatagcttctgacttattaagctaatattccttggtctttgacgatgttccgcgaacacatcaccagctccgaattgaggtatgattgttcctgttcgcttttccgacatgatctaatgcatattccatagtcttgatcaagcatgcatttttatttcagaacagcggcatccagtgtctgttactggaaaattcaatctctcccttgcacgagtcgtatcggtcaagaatattaaagtgcggttgaggggaacattcgcaatgtgagactctctccacatacttcgtattgactatcttcttacttcgtcatagcccctttgaaggaatcttgggatcagacagccgtgaacagatcacgtttgagcgagagcagcctctagcttcttcgaaaacgctcaaatcattcgaaatgccggcaggagaccacgcatttttattcgatattccgcttcctagcaagatcctcgacacagccactggcgcaaaccatcaatatcacacatattgcgtcgaggccattgtcgagcgacgcctcaaaagcgattttgttgtctcgcagccggttagaatttaccaggtttctaatttggaaacgagctatttacgactacattgtccactggtgagtctattgcatctgatagactttgctacatagatgactgaagatattagactctcgagggccactccagccaaaatatccagtattgcctctccatcactgaccggaacgttccttttggttgcacgttccctgtggaatgctggtttgcaccgctgttgaaatatgccaagctcaacactgtcacaatcaaagtcattgagaaacaaactgcgcggttagaagctactgctgcagactcagtgcgacataacatgcagtttatcactgcagcacaaactcaaactgttctctccaagaccatggatttctctcaaggggatgagtctccggtagacggttcggaaattgaatggcggttcactacaccagtttctctgccgcgaactctcgatgcctgctcgcagagtatctcgactagacatctcaagattacgcacgagctttctatcactgctgagttctgtgatgaggcaggggctgctacagctgtggtatgtaaagaaactcaggcagagatttatgatatacagctaacaaggagttagatcacggaagttatgccatttaagattcatatggcatctaatgtgattggagaagatgcgaccattcatgggcaagatatccaactcatgcagggaagccaaagccctcctccagcttacggcgatcgtctttcggacctgatagtatcggcagcttctcaactaaatctttgtgagcattctataccagcggagacggaatatccgtgttctttgagtgagcacggtgcaagtatccataccatggagcctgctcctcgatacgaagaggtcttatagtctgtttgtttggacttttgtctacttttagtttatgagtttaatgaatctcagaataaatatcggagtcttgagcgcttcactttcacaaccccttctcattctgttaaatactatatccaacctattccgtcgacctcaagtctcactgcatcttgtaaaccaacccctcttcagctcctacttgtccatgacacagtctctcccaccctccctcgataccattaggaccggagacaccactgccaaacacaatctgcattcccggcacgctcaagtgtcgatcatccagccatttctcccactgctcgcctcttgttttgaaataggtttccgggtcgacagactcgagtatcgtgtcttgaacaccagaagtgttgtattgaacctttccaagctccgccatcgccgctctcccagcaattatctcctccatcgagtatactttctgctcattaccaacctgaacaatgacaaccttgcaggattgcaactcggcatgattcttgatcaaagaaagcgtgtctttgagagcatttccctgaccaccaaagtcgacaataacaatcttcgaaggcccgcgactaaccagccactccgcgcactcctcagaaccaacacccccatacccaaccaccttagaaggaacatcagtaggtgaattccgatccgcctcctcgatggacgccacagccgacgtaacctgcaacaagcccagcggcgcggaaccacccagcttccgcgccacgtagtacgagaaaacacgggccgttttcgtcgacgcggcaaggtttactacaaccgcggacgacaattccccgtcggacagggtccagtgcaacccagcctggttccccagtggatggatgggaggttggttcgggttggacgagaaaacgtattcgctaagaacgaacccggctaccccacctatgtacagcgcggtccaggccatgcggtctagctcgtcccgtgcgggatctgggaggttgggtgcgtgcgtcagatcggagatcgggctcgatgtccgagttaccgtgtagcggttgtacagtggcattagttgttggcgatgagcgctggtctcgagccaatggtcttttggtgagccgcgtttgagttctaggtcggttggcgtgctggttgtaggccagaatccgtagaggagggttcctttgggtagttctgggatcgttgtctcttctactgttgcgtaaccccaggctgggacgattccccatgccaaggaatcgttgtatggtgcgggataggactcggatacggggtatgcgtcccacctgccagtaattgatgagaatcttatttcagggcatttctgacagtctcgtctagtctggaagatattcggaacataccaatgcaagaatccacccattagggcgtaggtcaaattgtttgaagtgaggctgatcagctgcgtgcgaattcttactgaagaatccgatagttccttctgagtagtggcttcgaggttgaagctcgcatgctggcggttatccagctttgaaaccacatgaacgcccatggtgagtttggtcgtgaggaaattgcggatgagaatgagttagttctgtaagctactcgattactgaacagattcatgaagattatccgggaggagcctcgccagattccttgattcttttaaactgaatggattactgatcagagtcatagagatcatccggcggggaacccccaccagctgggacggcgagagtcagcccgattatgcactgttgtgcatgacagatatatctttgaatgatattctattgctttattggtttatattgagatctgtcatcgaattaatcacgtaactattcaaattcaactatgtaatcaatcgtgagatccgttaactatatattccttgttccttttcggactaacaaacatctctacatacacgaatgagtccgcctttactgacacaaatcgataagagtaagatacaaagcactaaataaacacaaaaaccttgagcaaaagcgagacaatttaagctcagttctatggaaccatagagatcccagaatacgataaagaagttacagatatgcccagtagaatgataaattagcagaatagattttccaaagccgccgagagcaaagaattaggaaaccaacgaagatgagtgttagtgcaaggaatgaatgcagaatgaaaccgccgcatagatagatgatcagatgagaaatgagatgacagatgcagaatagatacgaaaggagagtggtataaacaggctcgagatatcagctcgatactcgggaaaggcgaagatttgaataatggaatgtgagatcgcttgtaaaatgacagggttcatgctcgcgctttgcttggcgcgggtgtatgcagagatggtgatgtgatagggattatgtatgtattttcgttcgtagactgttctcgtgaggtttcaggctagtattgtaatgccgagggttcaaggtaaccaggattggggttgggtgcttggaagggtgcgatttatttgggttgagattagaaaatgacgaatcgtttctgtttggcaggcttgtcgatttcatcttcagtttctaaataattcagttagcaaaatgtgtatacaactcggttggtttactcaccctggacatgacttgtggcctgagccttgcgctcggctttcttaagccgggctgtgctgcgcgtcgctgcattgcgcgcagcagctggatgtttgccctcggccgcagcccgaattgtagcaatccgatgcttggcccgctcatcgccctgatctgcggctttgacataccacacattcgactggagaggatcacgccggcagccaatgcccatttcggtaaagtagccgacagcatactcagccttcgcgaggccgagattcgcagcgcggagagcccactcatacgcctcgttgtcatccttctcgagcacaggctccgcgccaacgagataccacgcacaaagcgccatcatagccagcggatgtccgttctgcgcagcattggtgtagaaatggatactgagcgccgggtcgcgtggacaatttaattttccgtgctcatacgcatccccaagccgatagcaagcttcgacgtggcccagctcggcagatttagtgaatagttgcgctgcataagtggcatcagggaagacatcatctccgaagcctctttcgtgcatcacaccgagctcgtacgggccagagttatactgtgcatctgcagactcggtcgcgcgtttcatccatttcacgccctcgcggtaccgcttgcctagccccatatcgccagcaatacaggcgttggccatgcggatcatggcacccgggtggtttttcgacgctgcctggcggtagaactgtactgcgcggctgccgtcgacgcgacacccccagccgaactcgtagcttaacgctgtgcggtagcaggcttcgacgtggccgtgtttgctagctgcgaggaagagcgggaaggcccggtcgtagtcctcgacgcctttgctgaagaggcccgacgcgtatccgtcgccgagatagtactgtgcgaaggggaagctgcggtctgcgaggcgctggaggatggattttgattctcggagtagacgggcgcgcgttatcgggctggagtcttcgacgtccacgggcggcatctcgcgcatcgagttcaccatgaacacggcgaattcgtacagcactgttggctcgtcggttttcttgacattcgccaggtacatctcgaatgtctctttgtggctaaggagggaggcgttgtttccgactgaggcttggagacgcgagttgtcgaattgcgtggttgggcctggctgcgggtatgatgtgttgagcaaattgaggaatgatagagacctggtttccggggttcctgacgaggagcgcgcatttagatacggggatgcggagaggttacgtcggtgacgcccatcggaggttgaggagtatgccgaaacgggccgcgacagccttgttcgcctcacggccagcttatccgtcgaggcagacgggttatctccattgggtgcaggtttcctggtaactgccgcggccggttgctggtgatggtaggccagaggttcatagttgtcctccactagcggcacgctatccaagctttcccgcgaggagccgttatggctttgacccgcgcgctctaacgaggggcggctctttttatttccgtgtccgtcatccttcggatctatcaccgaccacgagccgctgctcgctggggtatgaccgtacgaattcgaatgtgtgtagtgggcctgtgatgagtctcgccgctggggatgggcaggattccaggtgtgctgaggcggctgtacggggtcgtcaagtgacaggtctgtgaactcagggaggtccaattgcggcgtggtgggcccactgtatgcgccttcgatgcgcacgctcgaggcatcgggaatatctgcgctatgtgcgattttgaccggcgagcgcggagagtgttgaatgacaagggaggtttccgatcgcgatgcttggtgggctggtttgctcaggttcaacttctggggtcggttcgggatagtccgtggtgtttcggacggggtgaatgacggtgatgatcggaggtaggctggtgggggagaaggcaatgcctggcggtgtcccggggcaggactggccatggtggagttgggaatatcaaagggcgaaagcgagcggaatttcaagatccatgaaaagcgcgaacaggtggactttatggggaatccgagctgtggagaacgagtggacacgaccactattgatatttctcatcgaagcgagcaaaagaaaagaacggtctctttcaaatcgtcattctttcttttcttttaatttatgtttcatgcgcctaatacgggtggggatgaactattattatgtctctcatgccctcgtctaacctaaataccatcagttgatgcctatcggatctgtaaatagggctttccgagacattcatcagccgcgccggtctaacagcgcataagacatgccttcaggtcaaatcccctctttcactgtggagacaacatgtgctgcttcacgtctttagttcgcctttagttctctttagtctctctttagtctttccttagtgtcttggtagctcagtagtgtctttagtgtccgacctttccggttgtgcgtggcagatgtggatggaaagtggaagtacactatatatccgtcctggaggtcagctttaatatctactccggactccgtgactcctatttgaaacagaggcttgagcgtaaatggcgaatatattgcccctttcgagtccttctctaacatgtgagaaacaaactaatcaattgagtttatccaatccatctccatgtatactccttgcagcagtcaaccacaccgtcaaagcacggacgaaaagcaaatctcatctttagatgacgacatttcctacgcggtgagttcattctgcttaacttgataccggcatccctcgcagtaagtactagatattcggtatttggagttgaagctctgtgctacctctggagacatactgtcggcattctagcaagagccaaagaacgtggccggacaaggataccggactccacagtcaagatccccagcaaatccgacgccaagttggtttctcaatgggggttatttcgaattgaaagggagtaattgcctgtggacatgatacattcctttcttcttcgttcaagatggtcgatcgaaaagatatggccttcgagttcgaaacggcttgatgcatatgcactagttatggggccatgggctggacggattctgggggttgccgtgatgatcggcggcctgttgtcgatcactggttggattggcattaccccgtacaggattatcctgagcttttatatcgaaaccatattgattttgacttgtttcaagagcaatatggaaagaactaacgcgttctgctgaccagaatccagcctggtggtacaaatattggtgttttgtcaagggttcgcacatatggcatgcattacctttcgattagtattctctgaagcttggatctgaatcacaccgactcaaacacaatatgtgagctcggtcttatctagatgtatcacaaagcaggttgccagttttcacaaggcgtgtcggactattaactatctagaatcggagtccgtgtaacagtggcaatatctaactagtcggcgtggcagttataactaaacatcaacagtctaagcccaaaatagaaacaaggaccccgtgatcagaaggaaaatggttgttcctcggctgttgtttccatttgatgaatttattaattatgaaccttgggcgacatctggctaaccgtggaaacgagagagtttaatttatctccgcggccagctgggcaggtgattggggtattgcccctagcgacaaggaaattatttatttttatttttatttcttaatatggcaaaacaagcctaacctccccaggtcaagcgcagagggagtcccgtgtacggactactccgtacagggtctttgtctcagaacttcccttttcccttagacacaattgctattactatttctactgctgcattcgctcgtctctgtgttttggaccctttcgttttcttgcgtagtggggactttgttattctccacccgttgcacaggccgaccgtaccactttcgctgagaagtctcaactctagttgctggtcaatagagatatcgaaaactgaaagaaatctaagattcgtacggaaagacgaatcctatagctcacattgtcgaggaccgggtctgcgcatttgacatgtttcagtcggcaagcgacatattgtgaacagtcttatccacacattcgctgttgatcagcggaaaataaccgaagtgagtaggccagtaagttcaatccaactaacaactggggtctgattggctgacatcgggaatcttaggagatgtctttgccgcagcggccagggagaccctcgcctcggcgtgaagaagcccgcgcatttcgcgaaccatcccagcgccgtcgacgggatatcgactcgggaacttacagcgacgacccgacttcccactcccatcggcatcgccgccgacattccagccatcggagagcaatggacacggacgaagaacgcatggaccggagcggggatgtgagacacaaaaagcgcatggtcaaaccagagcgcaggaaagacgaccgtgaccaacccaactatcactaccgtcagcgatcaaatcacatgcgtatttttccctcgacgacgggaaacgatccgttattggataagagagatgaggtggagacgaacagctcgcgcagcatggacatgaagagcaagggtctttacgcgcggggtaatatcaacaaacccatggagcgtgtccctagcagacatcgctcgaagaagaagaagagaggctcgcgaaggtcaaggggcgttgcggaggaaaagagacgtgaaaaggcaattgagcagagtggtccgcccgagttatggcctacatattgtgtagttctcacattcttcatcccggactttttgctgaaatgctgtggaatgccacagaaagagcagcgcactgcttggcgggagaagatcggccttatcagcatcattatgatgatcggtgcttttgtcggtttcctgactttcggtttcacggctacagtttgtgcctcgcccccggttcgattgaaggtcaacgaagtcagttccaactacatgatcttccatggaaaggcatatgacttgtccggttcgaaacaccccgctgtcactggtatctctgccaatgcgaatgttctctacgacttaccacacaagtatggcggacaagatggcagcttcttcttccaacaggtcaacggtgcgtgcaagggactgattactgccacgtctgatagcgatattccaacaaactccgatggagatctcggttggtacttcccttgtgcgcccttcaaccaggatggttcgtccgaaccgaatacgactgttgaatattatgtgggctgggcttgtcataccagcaaggcggcccgcgagcctttctataccctgcacagtgaaggggatgtgtactacacctgggaggatacaaagaacaagagtcgaaatctggccatatactccggaaatgtactcgacctcgatcttctcgcctggtttgacactagccaggtgtcctatcccaaacaattcgacgagctccgcaagaatcctgatgtccgcggtgttgatctgacttactacctgcaaagcggggaggagaagaagatcggcaagtgcttggcgcagatcatcaaagtcggcagtatcgacactgatactgttggctgtatcgcgtcaaaagtggtgctatacgtatccctgatcttcattctctccatcgtgggtgtcaaattcgccttcgccctgctcttccagtggttcctggcacccaggtttgccgcgcagaccacgagtatggcctccgacgctaggactcgcaatcagcagatcgaagactggtccaacgacatatatcgacccgctccacgaatgaccgaacccaccattcccgatcgcctcagcaaacgcgccagcttcctcccgaccacttctcgtttctccagcccgtataatgtgaacagcagcgctgggagcaagcaaaagccgttgtatgtcacgatggctagccagaactcgacgtctcggctcatgcccagctccaatcctggcactatgtataagctgagccacagcgggagcgggggcactctgagcgctgacaattcccggcataatcctggtgccagtcggactagcttggttccgaccggccagggtcaacaagatacgggttatgccacgctatcgacggattacgagggcttaggtcctgctggttacattcacgaggctgttgttccgcaacctccgcctgaatggcagccattcggctaccctctagcccacagtctttgtctgattacttgctactctgagggtgaagagggtattcggtcgactttagattctattgccatgaccgactacccgaacagtcacaaaacgatcttggtcatttgtgatggtatcattaaaggtaagggagaatcgttttccacgccagacattgtgctaggcatgctcagggagcctgttgttcccgaggacgaggtcgagccctactcctacgtggctgtggctactggctccaagcgacacaacatggccaaggtctacactgggttctacgactacggccataattcgatcatcccggcggataagcagcagcgcgttcccatgatggtgattgtcaagtgcggaactcctcaagagtcgacccagtcaaagcccggtaaccgtggcaagcgagacagtcagatcattctcatgtctttcctccagaaggttatgttcgacgagcgcatgacggaactagagtacgagatgttcaatggcctgtggaacgtcacaggcattgccccagacttctacgaggttgttctcatggtcgacgccgatacaaaggtgttcccagacagtttgacccacatggtctcggccatggtcaaggacccagaaatcatgggtctctgtggagaaactaagatcgccaacaagactgacagctgggtaacaatgatccaggtcttcgagtaagtctccactgtccattagcagcgcagtaactaattcaaaacaggtactttatctcccatcaccaagcgaaatcattcgaatccgtgttcggtggtgtaacctgtctccctggatgtttcaccatgtaccgaatcaaagcccccaagggcggccagaactactgggtgcccattctcgccaacccagatatcgttgaacactactcggaaaacgtcgtggatactctacacaagaagaacctgctccttctcggtgaagatcgctacctgaccaccctgatgctcaagaccttcccgaaacgcaagcagatcttcgtcccacaagccgtctgcaaaacagtcgtgccggacgcattcctcgtcctactctcccagcgccgtcgctggatcaacagtaccgtccacaacctatttgaactcgtccttgtgcgcgacctgtgcggaaccttctgcttcagcatgcaattcgtcatcttcatcgagcttatcggaaccctggttctgcccgctgctatctccttcaccgtctatgtcgtcgtcgtctccatcgtcaagaaacccgtccaggtcattccgctggttctgctcgctctggtcttgggtctgccgggtgtgttgatcgtggtcactgcacacagactggtctatgtgctctggatgctgatctacctcctctcgcttccgatctggaacttcgttctgcccatgtatgcgttctggaagttcgacgatttcagttggggtgatacccgtaagactgcgggcgagaaggataagggacacggcgatgccgagggcgagtttgatagtacgaagatcacgatgaagaggtggcgcgatttcgaaaaaggtatgtcttaggttgccctggaatgatttgtcgattctaatattctcgatagatcgtcgtctacgaagtgcctggtcacagccccctacaacggatgttcatccatcgcagtacgagccttattcacattactaacgaaagcgtcagcgcttcatttcttatttgctttttcttgcttcccctgatgcacgtgatctattgtactatttacatatcggcgttcaaacattcttataatatagttcagagcgttacacgactgacgattgattatttacatatttttggctttcttctgtttcaagcatttgctgtcttgtacggcgaattggactgggcgcgttgtatgttaggaaataatcgtcatcctactggccatagcgtaaccaaaatagcatcatgaaccctgtcaaccaacatgaactatcaaatacgtacttctaccacggcttcccacagatcacgtcagcccaagtcgtgcccaacagcatccaagcgtgagtcaccgggctgtccgggttggatgtgcatgttacgtgctccctgcattattctaatattgacacatgcgagaatatatgatcaagacgatgcactttaaattagtttacgtgcttaatgcttaacccatgtcggatcagctctatgatcgagcgaggtctagaatggacgggacaacagttgactgaatattaggaccgaatccttgcatattctcgcgatgtatcatcttttgccattcgtttctttttttgccttccatgtatatattcgccccgagctcgcacgtttctctccccacgttccatctgactgcatgggagtgtcagaattaatacgaatccccttcttccccttatttgaacggaaaagcctaccgcgcactgtcctgttttccccctctatttttcttgggatcagcccacatctcgcactagaatagcagccgctataagattgccccgttgatctcgtcttccttttcccgctccttactctgcccctcttcggttgccctcggcgttttctcgctttccgctctccgctctccgccttttccctgacttggattccaacgccacgcctgcagtgtggggttgaactctagtcgagatcgctgcacgagaggacagatctggtaaatcctggaaaccgagacactgggtttctggttactggatttttttcctccgctcgtgcgaccgctattatcagtttcgggtcggatgtccatggcgggcgatgcttcatcccgacaactgtaactctacgaatcgtccctccgactcatctgcccgctcgcgagatcccgctgcaccgccgcgtcatgtgttatatcctccagttcaaccccgagctatgaatcctctacatcgttccggtactggactgtctggtcgagaagaccacgcgacggcctggaattcgcctgatttcaatatacttcctaccgatcgatctgccccgcctgcgaatatgacctccgagatcgatcgccgcttccatgacgtgggtgtcgcagctctggctgctgtgtctcagtacccgcgtgccctggatactgcgctcggggattcttttctcgtgtcggaagtcgtcaacgctatcacgagtgcgggcagtcctcccgatcatcgacatttagatcccgtgggtcctatgccggtacaatggggtaattttcaacctaccccttcggctggaccggtgtttgtcttcggcgcgaacccgagtggtaacacgggtatggacacatccgttcgggacttgattaaccgcaccgccggcgggcagaatatcgccatcgccccggacagtgacatcggggatggtcagaaggatatggttatggattatcagtccgctaccatggaagacaagccatcgcccgcagcaacatccgatgatgagctggaagactttctccagttttatcccgatgaagaggagtattactacgagcgcatggaccggccgacgcacgaaccccaaatgccagactgcaatttggatgacttttataacagtatcagttatgaagatatcgaggtggatcacccaaacgtacctatggggaactacaccgacggtcagatggatttcgctggacctcaccccgcatctataatccacacgtcaagtaagacccaatgactgttgatacaggcctagctaattctctctagcatacgagcggaacctcactattgatgaattcatccagcgctggatggtctcgataaacgtcatcccccatgggttccattctgaaagtcgaattccaccgcagcttcgcccactctccaagatgatcagctggaagccgccgccggagattgttcggccgtctggatggagacgcgatttttacgatttgcagcagatcccgtggacagaaaccttgcgggtgacacggttcgatgcacgagctgtgcgtgacgcctggtatacttcgtatcataacttggattactcgcaccgtggatatgcaaatcgccttccccagcacgaaacctttttccgcgggaactctatgcacacttcacacaaagcgtctattgaacacttccagcttcgcaatctgatgtcggcccctgcatctaataccgtccatttcgcttccagctcaaaggtgttttcgtggaccccaaaaaccggcgacgcacgctgtataatcgacctgagccagcccgaccccgacttaggcttcctcagcccagtcaaaatatccaccatgaaaacagcgcacggcctgacaatcgccggcgggttctgcggggaatacgccctacgcagcaccagcggatccgaccctggcataaagggcctcgtaacccccgacttcaacgacggcatcaccaaccacatcgatataatccctagccgcaccggcccctccccgaccgccgtcttcgcctccaacgacaaacacctccgtatcctcgacaccgaaacaaacattttcacctccgaccaagaactctcccaaccaataaactgcaccgcaacatcccccgacggccgtctgcgcgtcgtaatcggcgactcaccggacgcatgggtcatcgaatccgacaccggccgacccgtgcaccccctccgcggccaccgcgacttcggcttcgcctgcgcctggtccccagacatgcgccacatagccacctccaaccaagacaaaaccgtcatcatctgggacgcgcgcacctggcgtccgctcgaaaccatcgactcggacgtcgcaggctaccgctcgctacgcttctcgcccgtcggcggcggcccgcgcaccctgctctgcaccgagcctgcggatcgcatctccatcgtcgatgcgcagctcttccgctcaagacaggtgcatgatttcttcggcgagattgggggtgcggactatgcgcctgacggcgccgagatatgggttgctaataccgatcgccatttcggtggtttcatgcagtatgagcgcaggatgtgggggcagcgggttgggctgacggatttgccgtgtgagtgggttaccgaggaggagttggcggtggatcctaggtgtgttttgagtaggagggagcgggggttgaggtttttgaggactttatcggatgaggagcatgatgcgttgattctttgattctcttatgactgttatgttgtctttttctttctttcttttttgggtggtattctttgcgccttttatctgcatctgataccctgggttgcggtgttggaggctatctatatttatttctttttttttttcttagagtattgtggctcataataatagttgtaactagtcgtcgcatacgttttatacttgctggtcacatgacatcacatctcggcgtatttattctccgattactaagcctcaaatatccactgcattggatacgtggacatcgccgtgtagagccaagaggaacgatactttggcaatttattttctgattgaattcattcaagttatcacttcctctgctataccactactcttctgtcagcttcatctctatcatctctatatcgtagttcctccatgtaaactccggactagaacacactgaaatcaccagatcaccagatcttccaagaaaaaacaacccaactcgatagtcaacgtctgaaacatccaataaaaagcccgctctggtaattggccacctcagcttcgatccacctgcaatgcgatctcacagcgaatcacccaaatcggcgcgatcaacaaaaaaactgccccgcaacccctcctccagcctcagctgaagctcttccattccattcttttcctctagctttctattaaatccatagcatatctccatttccacctttttcttgaacaattctatcatattcactcacatcctccattttaatccaaaatgtcttaccgcgataacaaccagcaatacggcggcggcggcggcagcggtggcggcgccagcgacagctactacaacaagaacgaggacttctccggcggtaacagcaataacaataacaactcctacggcggatctggcggtggcggtggctacggcaactcctctaacgagggccgcccttacgagggtcgcaacgagggccgcaacgacagctacggcaaccagaaccaaggccagggtaactacggcggtcgccaggagtcccacggtggcggaggctacggtggctccagcggtggctacggcgataacaacaactcctcctctggctacggcaactccagccacggcaactcttcctccggctacaaccaaaaccaagaccaaggcagctacggcggtcacagcagcggaggcaacaacaactcctcttccggctacggcggctccagcggcggctacggcgacaacaacaactcctcctccaaccagcactcttccagccacaacgaccaaggcagcagcagcgaagaaagctccctgttcagcaccgctttgaaattcctcaaagaccgcaataccagcggcgacgtcgacgagcagaaggtcgctaatgcccaccaggccatgtacggctccggcagctcgtcgaaccagcagcacgattccagcactgttggtgcgggcgctgcggtgcaggctttgaagatgttcgctggctccggcagtgggggcggcagtgatggcggcttggataaaaataagcttattcagcttgctatgtctcaggctgggaagttgtgggatgaaaagagtggttcggggggttctggtggtggtgtggtatgttattcttgtgcttcttttggttgggttattgctaatggtgttacagtccggtgataagcagtctgctgtcaactctgctgccgagatggctcttaaaatgtatatgaagaaccagggtggctctggtggttctggtgctagcgggcttatgagtcttgcgagcaagttcttgtagatgtttcttcttgttgaatgtgttggatgatgtctggcatttgagatatatcttttcattctagcttacgccgcttttgaacaaacaatcttgggattagccaaaagaagataacagtatcccatatgagaaagcgtatctgtctagcgttcctggttacttgggacgtattacttgactgggggactgttggcgtcttcggaacaactgttagggttgcagagcctatgtatactcaagcattctctaacctttactcccaccgttttatatcaaccacttcatttgcaataatactgcatacctctcaattcgctcagtcatattctaaatataactccatctgtctcggccaacggtgccggcgacaaagctttatgccaagccactgatataccgcaacaagtaccctatcaacccagttgtcgatcctcttagacgagtaaagatcgtccgattaaatctcgtattcttaattaatcacttacagagtactccctagtgcattcacactatagtgttaataacccctggttgatattcggcaattcaattctcgagattgaaaacggtatataccagaataggggtgtccactatttctcttagtttatctatgaagataccttatgaaatacccaataaccactaatggcattggcattggcattggcattggctaagtaatcttccaggggccaagttatgcattgagcttatccccagttttcatgacataccccactcccgtcctaaccgtcaacgtagattcttcagcgacatgtagatcaattccaatatagaatttcgacgatgcatttatcgctagcgcgctatagacacggcatatattcttgagtgtccaagccgagcgaggggtcaagtatccgtgctatcacaactatgcaggaaaaagcctgcacaattcaaaatgaacagatgaggtcgtactagatcatcaaggaatttgttatatatactattccaattattttctgccttcctgtcattctagtatgtttcttttgtccaattaggcatcttcttaattcaaaatgctccttcaatcggcttcaagtttgattcaggaacactatatctccgtcatcgccacttcggtacgtttactacaactttattcaattgagccagtctaacatgctctgcttagattctactaacattagtctcgcatgcatactaccaaatcttcctcaaccctctcagcaaataccccggccccagactcgccgccacatcacgcatacctcaaatctaccataccctaaaaggcgacctcctcgaatgggtcaccggactacacaatacccacggcaacgtcgtccgcgtcgccccagatgaactaagctacgcaaccggcgacgcttggaagggaatctacggccacgcctcagccgggaaaccagtaacagagaaagacacccgcttctacggcccatccttcaacggtgctgcagatatcatccgcggaaaaggccccgaccactcgcgtttccgacgcaacttctcccacgccttttcggaccgcgcgctgcgggaacagcaggctttgatttgtggatatgcggacgcgttgatcgacacactccacaactcgatccgggaggatcccgcagcgaaaataaatatggtccgcatgttgaatctgacgacgtttgatatcatgggcgatttaacattcggtgactcgttgaatctgctggctgggactgggaattgcagttgggtgtcggctgtgttcgtcagtatcaagacgaactctctgcgcagactggcgcgctacgtcccttggacggcggtcattgtccagcggcttatcccgaaggaactgaagcagcagagtatcgaacattacgaggcttctcaggaacgtgtggacagaaggatcgatggcaactatgtgcataaacctgatatctggggtattgtcatgagccagaaggaggacctccggcttagtcgggcggagatgtatgccaattcgcaggttttcatggtggcgggtactgagacgactgcgactgcgctgagtggtttgctctatcacctcctgaggacgccggagaagatggagattattgtagaggaagttcgtgcgacttttgagaaagactctgatattgatatgagatctctggagcatatgacatatctcaatgcgtgcattgaggaagggttgcgcatgtaccctccagttccggttggtctgccacgcattgctcctgatgagggattgcttgtttgcggagaacatattccaggaaaggtattcattccgttgtgttttcgaaggttggttctaatcttggatgatcatagactgcactttcggttcatcattgggctacctaccacagtgctcaaaacttcagattgccaaatcagtttatccctgagcgctggattggggatgagttcgccagtgataataaggccgcatttcagccattctcattcgggcctcggaactgcattgggaagaagtatgttttcgtcttgctctcgaatggtcctagctaatgatcgatagtctggcataccatgaaatgcgtctcattctggccaaggtgctgtttaattttgacctttctcttctgccggagtctgttggttgggacaaacagaaaactttcttcctgtgggagaagaacgatctgatggtccagctgaaggcgaggaaataagggcgatgtttgaaagaacttcgaatcttctattcagcattcacacattataggcatttcgaacaaattcgtagtttcagatggtcaaacccatctctaatgtactacaatttcaaggtaaagttaatatgaaaatcccgcataacagtgcatgcagttagccatatcactttgtcaagtacaataaatattgatacattttcgcgatgatcatatctgttccctgttttctatgggaacacgataacatgtcgaaatttggctgtgctgtccatgacaccgttgtatgcctgcgtgaattcgtccatcgtgaatacttttatcatcgccttcacattattggtggcagagtactcgatgcatttctccatgtctggtgcacagccgcaagcgaagccacgtagggtagcacggttcatgttgaggaggagattatcgacttggattggaccatccgtagcggcagagaccaaagtgatcgtccctagagaggatgtcagccaacggcaccacatcgcgaatggtaaatggaatggaggcttaccattcttcgtaacagccggtataatagcattgatggccttggaataaggcgcagtgcataggatgagattcgcaccaccaagagacgacatgtactcgacaatgtcgattttactcgagtcaatgtattcgcaggcccccaaggacaatgcgagatcccgtttagaagaacccgacgaaacagcatacacctagaagaaaagaccagtcagctatgctatagcaaataagatatcctctcctttacctttaatcctagtctgttcgcatactgaatcgcaaggtggcctagtcctcctactccctggacgaggcagatgtcgcccggagaccacttcgacgtgtttatggcatcaaatacagtcgccccggcacagcagagaggagcgagttcagcataggatgctgtcttcagcacatcctcggcaatgtcgatgatagccgtgtacggagcgtacatatactccccatgaccaccatctatcgtaaacccagtgtaatccacgttgcggcaggtccaaaactgtcctttccggcagtaatcgcactgattgcagtagccgccattccaaccaacgccgaccaaggcacctatggcgaaacgctccttgttcaccgggctttgtagtagctccgagcccacgccggcgatacggccgatgatctcatggcccgggatgcgcgggtactgaaggccaggccaggcgccatccttgacgaagtggtcggagttgcagatcccagacgcgtgcacgcgcacgagtacctctgtcggtgcgggatcacgcagctctaacgtaatgacgtcccaggtactctgaggtgcggcacattggactacagaatacgtgtcagaatgaaccaatgaatgcaaacataatgacaaaaacacgtacttgctctgtaggtcttggggagtgaagaagccattgttagttagggttaaataatgaattacgaacgaagcgtcgttgtagaatatagattgggtagagttcttcaattgaaaatggtggatatccctattttatagaaaagtttactattgcaaggagagaccatgaacagcacagaagaaatccgaatacaaagatatctccgagaaaaggcttttgttgtacggacgtaagcataactccggatcccgattacgaagacccatagcgctcagggttcaaaaccccctttagaggggattcggccggaggaaaacatggcatgttaccactaattagggcaaaaaggtgcatacaccttagcaaggataaccggtgtggaagcagcggacagttcatccaacctgtttattgatccaaccgatgaagataagataggctatcggtcacgtgactttgtcgggccacatcgtctcggaagttccgacagattcttgaggcctgaatgcctgaattagcaccgctctccacaccgctctggacaagttcaaaaaaatgaagccttcgggcctaaacaaatcccgtgacaatcacccgatttgatcaattagatcctttctagcatctaacattgaattgccgttttcagaatcaaactatgtatattactggtgatagtagaattaatttaacttgcttcggattatgtgatctctgaatagcttcatctgctaacatggagatacccggccgacagctgatcgaatgttgaaatgggaccgctaatttagctttaaggaaaatatattaatccgtgttaatccgcgtttcgaccatctatctgctccgagcggtcttggcgaaatatcggtggatgttgatagaataatgatattgtatgattttgattcgcgaaacggtatatattgaactgactctacaaaatgtaacgacaagggtagaaaaaaacaatgactcgctgacctgtacatgcacatgccacgggcccaacaaacaaaaataaaaggtcaacgctaagcgcagaaatgtccaacaccgcgaccgaccataaacaattactgctcactctaccactcatcgtcgtcgtcgtgtttgccctgcatcgcactttgtcgtgcccgcagtgcctcggccaaaccacctgccaggctgacgttcgatgcgctgttgggcgtgccgcggccgctggcgcccgatgagtcgtttgactgcatgctcacggcgctatcgcgcgcagtgggcgcgcctgcgggtttgcgcccggccatgttgggacgcttggccgggggagcaggagggtgaggcttgctctttgcagctgctgcagctccagcgccatttggaacagggctgggggtggcgcggggtgccatcggaggtgggggtggaacgggcttcggtgtgggagcgacggctacttcttcgaggtaggattcgggggtccatccttgctccgatgttgttgtgttcttgcacagccaccatcctagaacatgttagtatgattcaaatgaagtatgctatgggtacgtaccatttccttccttggacacaacctccacaatttcgcccttggtgatggaaagctcattggcccggtcgctgttgtagtcgtacttgacctttgcggcaggctttcttgacgctggagggggtgccgcagggggaggcggaggagccctcatggagccagaagatctcactgagctacgcgactcgttccgagagtgcatggcggcggcagcagctgccatagactggggcacgatgcgcggctgaggctgagctgcagcttgcggtaccatggcaggctgtggggtagaccggggcagaggctgagcggcagggacaggtctgcgagcagcttgagacaatttcgaagggccgccaccggggccaccaggacgaagtagcttgcccgttgtgaccgggcgagcagcaaccgccttcggccgcggagtaggtttggagacagagctaggaggctcaccagcactagtgtggattgtgctgcttttgtagctgtccacgtttccggcacccggatctttgactgccttgacggttgccagcttgccaggcttcttatggtattcgatggtttctccaatcttcaaggtcagagagccacgcaggacattggtgagatgagtgaagaactcggttttgaagacacagtggattagcgggtcgggttcctgagctccaataaccagcgaaaaccagtcatccttgagattcgaggtgctgacactcttgatcgctccaaccggaacggttcgttccgctgaaatgacaagctggttgttttcgatactttgtgcaacaacgaaaacgtgacgattcgtcaagaccaggatccgcggaacaggtttgctagaacgaccaaacttagacaccaaaacctcggcacggcaagagaaaacaacatcatctgaaccgctgatgcctgcaccattgcggatcatttcaccaggaccaccggtattgccgacaccaaggtaatcacccaggaagcgacgagagccgagaagactcattctccgacgttccttgcgaccctggagcactttgtgtccctggtcacgaatcttgatgaattcgagtccgccggtcatgcggcgccagaagcgctggatacggatcgcacattcaatacggtaccggagatagtttctccacgcacgttgaatgcggatggccatattgtgccagtatttgtctcgcatggcttctagtgcgaatagtgtctcgggagtcttgacgaaaacctttgtgatacccatctgatactcctcggcagggatgcgggtatccgtcaagatttgcttcgcgccggattccacgtcaccagtccatgtgtagtcaccggcataggaagtcttcggggacaacaggtagaatcgctcagtgaacttgtcgaaggtctgacggtaggcgaaaccagcacgtcgaatgcggacgttttcctggagacccaggtacttgatctggtgcaggacattgccgacgttgaattccttgggggccttgttatcgttgggtttgatggtacgaatgtaagatggctgcgccttcatgagcgtggccacaaggtcattcgcggatgccttgatcttgtcaccggcggtaggtgggcgacgcttgtcatcttggttgacctcgttggggaacagcgcgtggacgaattcgttgctgctagattgggcaaggttcaacaagtccttcaacagctgatccttgttcttatctgtcattccctccacggcgtaactgacatcaccagcgtagtgcttgatgatgaactgcccctggcgagcttcaaagttggggttctgggccaggaagttgagtctgccaacgaaagtctgatcggccgcaccggaatcggcgtgggcagttgcgcaggcatcattcaaagcggcgaaaacaccaggagggcgcttgtcctcgatcaacgagcacaccaccttgttgtcaaagtactcgataggagtccacttgatctgctcgcgggcatactcatcttgttctgccttgagagtcaattgaatgaaaatctgctgcagtttttcgttgacatagttgatacacagctgctcgaaagagttcttctcgaagatttcgaatccgtaaatatccaggataccaatcgaattagtgatggagcctcgagcagtcagtgactgattgacgcgctctacaatccaatcgaacagattgaagtaaattcccttggccaaagcgtcgcgaacggctgaagcttggaccctgttcagcggcacttcgtacacagaacccctgcgccctcctcgggcagtctccatcagacgaatagtcaacgctttgtttacttgagcagcatccacctccagcaggtaggcgacaaagtcaacgattgactgatcgctaatagcagcgttgccagagtcatcctcggtgaactgaacatttccaatccagagaatagccgctagcatgcggaacacattgtcctgctcggcatcgctcattccaatcacccgcatcgcatccagtgtatccttgaactcggcaacatcgtcgattccgggcacatcataacacttggaacggctcgtatagaggtaagattgtggttgctggagaccgaagctgtcacggtacttttgtggggccccctttgtgagttggtaaaagatgtggaaattgcgctcattcacaatttgtcccacaactcgcgacttttccagcagataatttgtaatgttggctcccaccggctcaccgttggcattgaactccaattctaggtattttccgaatcgggacgagttattgttgcgcagcgtcttcgcattaccgaatgactccagcaacgggttcgtcgccaaaaccatttccttggtctgttgaatagacgaatcgccgccgccggagacactggcaatgtattgcatgatccgcttcgcggcctcggtctttccggcacccgactctccagaaatgatgacacactggttgtccttgtaagacttcatgttgtagtatgcggactcggcgactccgaatacatggggagggacttcgagacggttcttgccgcgatacgaatcgaggacactatctgtgtagatacccactgtagtcgcaagtccgttagcaaggaggaaaccgaattctctcggcggagcaactcacagtcccggaaaggatttactgagaccagcacatggccaatataagtctggaagtctcctgtcagcctgtattcgtgttcgcgcacaaccccgcagcccgcgtgcaagagcgatcccttacataaatctcgtcatgctcgaaccggagcttcagattatcgttgatggcctcattggagatcttgctgagcagcgtgagatctgacacgccgatctccttcttcttgctgctctcgaaggcggccttcctgaccttcggctttccccccgcttgccggccatcgccaacatctgcggctgctttggagcgcccgaagcggctcttcttctctccgccaacggggcgtcgtgactgaccctaaaccgcaatcccagggtcagtttggtccttatctggtcgttgcgcaagtaggccacctaccatcttgtgtcaacctctcggggatctcgcgcccaggcgacaatgtgcaaatctaagtcaagcaaatgggggaattctagtgacaagttgagattgaggaattgagagtgaatggaaacagtctagaaccaattcaaggtaattgtaagagggaagtgcccactcggcggacttacgtacaactggtcaaaccgaagcaaacagctgcgccacaaaggaccctttttctggttccgtcgctgcctcaggggcgaattgggtatcaatttagccgcctgcccttagaatgatctttttgatactattcttattgatctattgaatttttgtcgatactcctttttcttgaacctccttggccagccactcacgtcagggcatgtggctaatgttaagaataggtgcacgacgtcattgggcatatatactgcctaaccaatttcgattgatatgcccagaccagatgaattggagccatgaaattatatatgggtctactcgatttgcatgtaatttcacttatcgttcttaactatgtagcttcgagtctgagagaccgccttgctggttgccgaggcatggtaacggtgtcggtatctatcttgacgcctgtaacacatcttttgtattctcttagattttgcctccgtcccatagctggcttcggtctcggcaaagactgcaccggcggctctgggactgtataactggcccgccaggtttgatggtgggcattgacttcgttctagaagttcaatgaatggcaaagacttgaagataaaggtatgatagcgatagaggggaataaaactgttgattaagttcataactatccatattgttcagagtaacacaccatcggggctcaacctcttccgtaagacttatgacggaaaaaaaactagcaccaacaaactcaatctgggagttcacttcttatcctgggatgaaaatgagaatttcgatggctggaacggcgagggtgggaccgacgcgggtggaaccgatgcggctggagaagatctggattggaatgatgtagctgcaaaggatgcaggtacaagcgcagtcggtttcggcaacacatctgcggtgttgaccaagatctaatcgtgatatatgagcaaacgaccgaactaagacttgtcatcaggcactcactggattggctcgggagacacccttcatgtaagcacttacgcaatccagaaggtatgatgcgtcggacacaacaagaacagggggtggctccgagaagcccaaggaaaggcagtggtgcagtgcaccgagagactgcactgcctcgatctgctcgttaccggacgatctcgcatccattaagtacatgatgacccccaaggacttcttgttagcttcggtgaacttctggattgcagtcgcagtctgatgtctagtggttacgctcagccggctgggggtcaacaaaagtgcattgagcttgagggagtgagtctgatcgagtacgtcaaacttcgatagggttcggctctggtagattagcttgaagctgaagtcggcatctcgagcagcccacaaagcttgatgagatttaatggttggactttttgtgacggagtcaagggaacttacaactgaaatctttcttggagggctccggcgaggctagaagatacggtcagctccacatgttgactcaatggatgagagtactgtaccttctttcattgtttccaatgcagtcagggtggtggccagcctggcccattcatcacgtttgcggagttctgggttgtattcaccccgaagaccgagcgttggcgttgttggagtcattacgacagtagagaagagagattgtgtactgtcactgtcgctcgtttgaggatggaaatggagatgagactgccagaaagattgagtagagagaaaacctgaacaaaaatggaattgtcaggcgcaaaagaatgaaagagaagagaagagtggttgcctctatggacgtgatgtgtgtatgtacatttcagggaaggagcggaatatcaagtgactccgcctcgcaacccctactctctcgaaaacaaaacaatgcttgtgatatttccagtggtcttttctatggggtatcttgactgaatgtaaaaagcaaatgcacgcctaaccttatataataagatatcgctaggatacgagtatcaatcaacaatcacgagcttttcgatgcaggtgatgatgtcggactggctgatgcagagtgttcctgggtttgggatgtcgatgcagccttttctgcggtagccctttctgctgtaggctgggtaacaggcgcaggctcggccgtctcctcggcgcgttgaccgaaaggaatgtacgaggcaagtcgtgagagccacccatgtacgatgtccggcgtatccgactctccggcttgttcatatatctcaggagacagaatcctcttcgtgtgcaacttaggcaagtcactgtgcttcgctctgagctgcagtacctccttttctagtgccagcagagcttcgcgtgcggcctgttcggattgttctagatctgctagtcttccctcgacgccttcccggcgggtgctttccttgctccgtgaccgccatgactcaaataggatcagacctccagcaacaaggaagaggaaggactcggagatgaaattggcaccggactcgatagctttcgactcggagaggggacggatatgatagtgttgaggcttggccgcgtcttcagccgcagccttggccttggcctctgcctcctcggcggctttcgtgtcggcggcgttccgaacggtggggattgaaagcttgtgttttcgcgcttcggcggcggcgatggcttgacgctgtgaggcggcagtatcgcgcagggagcctagtctaagacgcatatcgaatcggtgaagagcctgggctatagacacgcagatattgcgaaaccgttcatgttcgcgggcctgggctttaatttgagactgcgtgggtcagtctatgaatatggcaaggttggactgggatgcaagcttacagcgatgggcttggacagggtccggattgccaaggaggagagcttcaaagtcaacgacatagctggagaatagagagtgaatacatgaggcttgagtcacttccttacctccgtgttgcccgtggacccgcggacccgcgttgattactcagcaccgccaacaccgccctggagcgatcttaggcttaatttcgatatttgcttggcagcgacaacagctgagattcatgcagttgatataatactccgtgtatgtcaaactactgcattttacagtcccactctttaagagagataaacagagccagtaatttctcgacatcgcacgggatgcagccaccctatctcattcatatagggctagcctgtcaggccaaatgtggcatgtacaaccgttcggagagtaaacaatgcacattctatggcctgttctttctgtcgcaatacacattgcatcctacaagcgcgccatcctgcagtaatcagccaataaggatcccagaataatgccattccaccaaagttacccccggaccccacggtggttcggctgaagcgacgttttaatataatttccttacgcgagacctcggatttaaccccaaactaggcagataagcaaaaattagcctctcctcatcgaccactaaaatggtgtgattgctttatgtagtatttggccctggaaatgttttcgcctttctctttcctgcaacgacgccatggcaggggtattcgaggaaaagagctctaagacagggagtcagtacgtcgtgcacaattttcacgatgtggaagatcaacccttcaccccacaaggtcctttgagcgctgccatccccgacgacgggcagatcgttacccagaatgaacgccaaagcttgatccggggtctggggcagcgccatattcagatgattgccattgcgggcgcaattgtacgcaaactgtttattaggattgcaactttgtgactgacctaaatagggtacgggtctctttctcggtctgggtggctcgatcgccaccggtggtcctctgggtgcccttttaggctacatgttcatcggcctgatagtctgctgcatccaatttgcgctgggagaagtctcagcgctgctaccagtcaccggttcttttgtgcgacatgcagagattttggtcgatcccgcgctcgcatttgcgatcggctggaatgtcgtttatggatgctttctcagcgttcccagtgagatctccgccagcgtggttcttattcagtactggacggatatcaacgccgccgtctgggtgactatcctcatagtggtgtcggtggtggttgccgtctcgtttattggcgtctacggcgagattgaatttatcttcgccattctgaagatcctgctggttgtcttcgtggtcattctcggtcttgttatcgatctcggcggtgcgccgggtgtgccccgacgcggcttccactactggaaagaccccggcccattcgttgagtacattgccaccgggtcttggggacaatttctcgggttctgggctgtcatgactaatgcagtctactcgttcgctggcgtggaatcattagccatggccgccgccgaaacgcaaaacccacgacagaatatccccaaggcctgcaaaagggtgttcgcacgagtctctatcttctaccttgccaccgtcttgatcgtgggcatgttagtctctagcgccgacgaccgtattagcgcagactccggcacggcggccacgagtccgttcgtcattgccgccagcgacgcaggtatcagggctattccctccgttgtgaacgcagtatgcttgagctctgcgtggtctgcatcgaaccagagtattctggccggaacaagaactctatatggtctagcgctcaagggccatgctccgaagatattcctgcgcacctccaagtggggagtgccgtacatgtgtgtgctgctgcagatggcattctctctactggcttacatgtgtgtttccaacgacgcaatgaacgtcttctggtggttcgttgatttgactgcggctggtaccttggtctcgtggattgctatcgctttcaaccatattcgtctgatgcaagcaatggataaacagggcatatcgccaacagagttgccgtggcataaccgaattaccagtatgtatcagtctggtttcagatcagtcttgaggttctaatactgaccttatcaaggatacacaagctggtttgcgctggtcgcatgtgtcataattctcttcactggaggattcacagtcttcacaacaggaaactgggataccgcctcgttcatctcgtcgtatctgtgagttttcttctcgtaccattgagttcgatctgctaacattgacactagggacattccactcgtcctctttgcgtacggggcttataagttgatccgccgcacaaatatcattcctctaaggacgataccggttcaacaagcgatagacgaggccaacaacgacccggacaacttgccgatcaagaaagacagcatactggcaaagatgaatattttctggggctgacatatctcctatcatagctagcagactagcctttcacttaataacataataacaaccccgtggcattgtgttttgctcccgttgttctatgtagtctcatgtaatcaatatatacatgtaatcctaataccccttgccccgcgtataagagttaatcaacggcccaccccgcgcgatacgctccagatttagctcaaggatatcaagcgagcgcgggaaatactccaccccaagcgcgctgacatgcggactaatctgaacattggcagcctcccagagcggatcatcctgaggaagcggttccggatccgtgacatcaagcgcagcaccactcaaaacccccgaattcaaagcatcgaccaaagccttctgatcgataaccctaccccgggagatattagtcacgtaaggcttactcgaatggtgctgagaatggtccgagagaatggtgaattcctcggcaccgaggagacggtttgtttgcggtgtcagcggaagtgagaccaccagatgatcgagcccggtagccaggaaagagcggagggattcgcggtctgcgccgtgatgccacgatgccgggatcgagccgtcgggatcgcccgtgccgggcacgatgtagccgttgtcacgccgggattcgggtgttgggcgtggggtggccgtgtatgcgtgcacggtcatgcccaatgcttgcgagacgcgggcgactgtcgatggttaacttttggtatcttgtttatggaatttccagcgagtggatgtgcggaaacatactttggcgcccgatacttccatatcctagaatacctacctttttacccacttggtcatgaagacctggcctatacgcggccttatcccatacgtgggatttctgtgcctcgtagcccttggcgtatctccgggatgataccagccaattcatcacagtccattctgcaatcggaggaccatggatacccgagcttgtagtgatggggatatcagtttcttgcagaattgggttttgcaaaatatgatccacgccagcagagaaggtgtggattagtttaagactatagtaatggttaatacatagtaggaatgattgaggtaggagcttacttcttcgagtccttgagatcaggaagatcgctgaaagtcgcgaggacggtggccttttgatatacctctgcgcgagtttagtttttgtgacctcgattttcaagaatgatagccacttaccagatggcacaggggttccctgagactcgtagatagtgacctcggcatgggagaatttctgtaggataacctccttcacctcttctggcatcgtcgggtagaaaataacgagcacatgctccggtgacaatggcgcgtcgcccataattgcgatagatagttttcaaagtgtgtgaccaaaaaagaggtttggggctttaaatgggaattctcacagggcgcgggcaatgttttccttatcttccccgcctcggtggctcaaaagggcaattcggcatctccaaggctaacatttccttataaacggatcggatggcggtttcttattggaatttggggagatggtggtggtttatgccagatggcgtggtatgacgacactttgattagatatggtctcagcgcacgaattagtatagtgcgaggctttataataagttgaaggagctttctagaacaagaatgacaccatcaacagaaaatcacatctttgatatcatttctactggaattgagtttgtgcctgagtgctagctacaccaggaatacctcagcctcctccgttctggtcgaaacgagtggtctactaaccggactcgacagtgttcgcctacacaaacgggtcaagataatttacgtttatatgtgtcgatgaatgatcttcattgtagacatacttcacgagccttggtatggattatatgcgcatacgagcccaaacgcgtcactcccatggaacgagcatctttagatagccacaggaataaatggttatcataagcttaatatccgcggtgaaactacatgcacgaaattgcctctaataatatactgtcaggccccttgtcttttacaaagaagcgggtcatagacctgcattcctatactccgtaaggagtactgtcgctgtagaacctcagctttctccaccccactcggcatagcacaagacctccaatttcaactccgatacaaaaatcaattcaatacacaacttaagccattggataacccatctcactacatcgtcacacgcaattttcaagcccaacctaagatgtctctggaaatccaccccgcgtctcccaaggacgcgcccgaactcgcgcaagtcttctacgccagcttccgtaccgactgcgacaaaaccatgttccccaacacgccggacgtgacagaatggttcgaacgcttttttagcgccgacatcacgcgctcaattgaaggcgagacccgtgatgtattcctcaaggtgacggaggggtcggaggatggcggggatcggattgtcgcattcgcgaaatggaagtttcccgtgcctgcagatcgcaatcggcatgaggaacagatcgtgtggcctgctagtagtgataaggaactatgcgatcggtttttcaatggtatggaggcgcgacatgagaagtggatgggggagaggcctcattattgtacgtttttctttttcttcttcaaatctttgggtttggtatttctcgagcagatacgaaggaacaccactaaccgttatagatctggatatgttgggtgttcacgcttcctaccagggcaagggactgggctcgagactccttaaatggggtctcacacgcgctgatgctgaaggcttggaggtttatctgtccgcgtctccggctgggaaaccgttgtatcagaaatatgggttccgggaggttgattccttctcgccgtaccccgattacgcgcaggtggcgatgatacgctcgcctaatagtcaaatataaccggattatttcaggaagcttagcacgctagaagtagaaaaaccgggacttcaaagcaaatcatcatttatcgctgcgccatgtcttgaagtctcttgtggtgtttaaaaaaaagaaattaggatatttgtgcgggatctatgtatacttattgttcttcaacctaaattagcgaaaaaaaacaagggtgtggttaatatgggcaagtacgttctatcggccgatctgcagaacttttgcggccctcacatattcttgccatctaatcaaaatgacatttcgcatgacgcttttagcatttccatattagattccttcaatttaaaaagaagaagaagaaaaaagaatgggcccgagcccgggatcgaaccggggacctcgcgcattaatgctttgggttaaccctaagcgcgaatcataccactagaccacccgggcagttgatagaataaggttcaggactggggcacaaacatggagagacatattgaaataccaaaaagagatattatcgctgctttgaatatcaattgctttgaaaaataacctaccgacttagggtgaggaagctcaagcaggggagcaaaggtctgccctagcaatggaggttggacatagagagaggaggttgcgggcatcaagacatcaagacatcgagagatgaagtgaaggtggtatttccttgaaccagaaaacaaggtccgggctaaagagtaggggtccggtatgatattatatatcaaaggtgtcatatatcatctccagggctccccaagccaagaagccgcttataaatccaatattgggtccacttcaagactgcggggtataagatggagagatcaaaacttgttcttttttgattggaaagcaatataaaacgtcatttccaaggctatctaaccccaagtatcttgtgtctttcattcaaagtattcaagtgaacctgtaacgccgagcttcccactttcatccccttggatatacaaaatgaccaaattattcatgtgagactctatctgaatataaaaaactaagcttctaacaactccatagtaccggtgtcacaggctacatcggcggtgactctctagccacacttgttgccaaccacccagagttctcatattccgctcttgttcggaccaccgaaaaggccgaacaagtgaaggcccagtacccatttatccgaatcgtaatcggagacctggatgattcagctttactggagcgagaaagtgccgccgcggacatcgtgctgcgtaagtatccaactcgcccccgatgcgaggagcatcctatccgcattctgctaagcctgcaaaacagacactgcagatgcgtcagatcacgtgggagccgcgaaagccattattgccggcctggtagccggccacagcaaggaaaacccaggctacttgctacacaccggaggaactggtatcctgtcctgggaggacagcgacaagaaagaatacggaaatagaagtgagcacgtgtacgatgactgggatggggtggatgaactactcaatctgccagatcacgcattccatcggaatgtcgaccagctcgtcctccaggctgcagcccagcatgccgatgtgctcaagacggcacttgtttgtccgcctacgatctacggtacgcatttccagcaacggaaagaaagaaaccatttacttattttcagcaggcaaaggaagaggtccggttaatcaacgttcgcgccaggtgtacgtattagcgaatgtgacgctccgtctcaagaagggcccgataatcggtgccggccagtcactgtggaacaacgttcacgtcaacgacctgagtgacgtctatgctctactagtcgacgcggcgattgcgggccgaactgatgacgggctctggggtcctaaggcctactaccttactgagaatggggaacactgctggggtgagctagccaaagctacagcagaggcagccacgaagctggggtacctgccagaggcaaagaccgaggtacttgaccctgttatcgctaagcagtatggaggatttgagtctcttagttggggcatgaactctcgtggtcgctcacagcgggcacgcaagatcctgggatggaacccttcgcggcctagtctggtggatgaactaccggagattgttcgtggcgagtgggagcgactgcaaaatgcttcctagagcagtcgtttgacatgtctcttctttgtctcagagcatgttgattggaattggtgggtttgaagtgaaagaatgcggggtgaccccgagagtttgctgggtcttatatcccgatcagcatagaatgggggatttgatgcgagacctagctatttaaatgttgaccggggacatttcaacttggctagagccagatcttcagaatcgagacatgtttcacccctcgacaatcaagcattatggcttgggctttctagagtggcacaagtgtaaataccagactcgactcgagccctcgagtatttaaagtctggtctcgtataataaggcgcagcagcgttttcagccttgtataagccagccggtgtagggatagtcgggattgagatcccatcaactcagcctgggacaatcataatcccgaccagcgggccgcataatactaaaagaggaaggagacaggactgatgcataatcatggtattcatgcattcacccggccccgactggtgagacggcgaaatattgcgccgactgttgacaagccaactgggctgatgcagccaatgaatgctagccatatccaacccaatcagagccatcctagagacccttgagactaatctcgcgattataacgcgaggattcaggttatagccagcggagtcggaaattctggatcacgacggagcaatatttcgccctgttctaaattgtatatgggattttgtcaattccgcgtgccgtggacatgtgttgtactcgatgctgtttatctatttaccatgcagattcccatttcaatttcttttttttttcttctctagtaggagcttatacatttattaacgttccactcatcttctgatcgctagattgccgtcgccgttgatctatcgccatggcggactcagatttcccattctatagacccgcgaggtccgaatatgccgataacacgagcagagcatctacagacgtgaaacggaaaaggaatgtcgatgaggataaatttgctttgggtcggggaggaaaactagtcttctttacattgtctgttctcaccttgatggccgctttggacggaacttcgctgtcggttgctttacctgtgagtgcgtcaacaaatgatttgatatgttgaaacttaccaggccaggaaattgcaaaagagctcaatggaacggctattgaagctttctggagtggaacttcgttcctgttatgctcaacaggtatgtggcaatatgttacaatacgatcaaaccctttaaccttgccatagtattccaaccgagtttcgcctccttctcgaatatcttcggccgtcgacccatgatcatgatctcccttatatttttctgtgtcggcgctataatcgcagcaatcgccaacaatttcacctacatgttgatcggtcgttccatccaaggtgtcggtggaggcggtcttatatccctaagcgaggtcatcataaccgatctcgtccctctgcgatggcgtggtcagtacttcggtatcctcagtgcaatgtggagtctcggatccgtgacggggcctatcctcggtggtggattctcggaaaatgtgtcttgggttagttgagctaatccatttaagctccgcaagtatttatgctaactacgaatagagatggatcttctatatcaacttcccattcatcggagtcggcgggattctcgtcatcctattcttgaacctcaagcttacccccagttcattaatcgacaagctccgtcgcatcgattatttcggtaccatcttgttcgtcggaagcgtgtcatccttcctgatccccctcagctggggtggcatttcatacgactggagctcatggcacacacttgtaccgctttgtgtcggaggcgtagggctggtcgttttcggattctacgagtactacttcgcctctgatcctattgtcccgcctgtgatattccaaaaccgcacggcggtagcttcgttcattgggagtgttttgcaaggcttcatcctatggtgtgccctctattacctccctatgtactatgaggcagtgaaggagtacagcccgattatctcaggcgttgcgctattccccgagacattcaccgtggctccgagtgggatggtagccggcatcctgatcacggtaacgggtcgttacatatgggctatctggctcggatgggctttttcgactgtcgggctaggcttgatgtgtctgatcaaggtggagaccagtatggtcggctggatcttcctcaatatcgtgcctggccttggattgggcattctcttcccatctctcggttatgcagtgcaggcctctgcggacccggagaacctcgctattgcggttgccatgtttagtttcttccgtgctctcggccaggctatcggcgttgctgtcggtggtgttgtcttccagaatcgcatgttcaccaacatctccaggtatgctgatttggcgcctatggccgaggcgtacagcaaggatgccgctggcttggtccaagtcatcaaggcgatggcagatggcgctgataaagcgaatctcaaggaagcctatacggacagtctacgcacggtctggatcgtctgctgtggagtgtctgctgtggcgatggtgataagcttcctcactgagcattatgaccttgaccgtgcattggagtcgaaccaaggacttcgtgaagaggatgatgatgatgagtctatcaacagtttgaaggacttggagatgcgggcagaccggagaattgtcacggagccccgaccttgggcgtggtagtggaagtttttctgacatgattgatggagatctataatgtataaagtaatgatatttactgtattgaagttcattcctagtacagactgttctcttgagcaaagtcttgctcccttcgtctctcccttcgtctctccctcgtagtctagtgtatctattttcaataggtgggattcatggacaatatatacatcggtgggatcttcgattaccggtattggggggggggggttcgaatgtgccgtgnnnnnnnnnnnnnnnnnnnnnnnnnnnnnnnnnnnnnnnnnnnnnnnnnnnnnnnnnnnnnnnnnnnnnnnnnnnnnnnnnnnnnnnnnnnnnnnnnnnnnnnnnnnggggggggggtgtgggtttgcgggggggggggggggggggttcgaatgtgacgttgccggggctcttttacggctagatgcgcgggaaagcttcaataaggaaactatacaatacgcaagatcccgaggagcaagcgggtttaaacatacggattagaaaggacggacgccacatgggcagtgatacgagacagtgcaagacatgtacatttctgcaagtagccgaaaaagaaaaaaacgctgttatacaacgatatcgacaacctggaagctgaacttcaaacattcgtgatcacatcccacaagaataaacataaaggatcacatcacagaaacaacaacgaatggtcgtgacatcgtaaagtagccatggtaaatagcagaaggagtaaagagattggatcaacgaccaagtgcacgtagccggtctttgagtagctgcatttctttgtcatattccatcccggcaggctttgtcacccggttattatctttgatcatcatagagcggtagcgaccatcgccatctggtgctccaacagtcacccagacaaacttcgttccggagctattgggctgcgaacgctcctgtgttccttgccagaatgcttcgtcgggtacggattcatcagcagaagcggggtcaaccgagggcgcacgacccccaagtcgcccgaattcaatccaaactctgagggtatctttgatgaaggtgattttctgcacgaaggcgttcgcatcaaggatgtcccggatgcggtcttcggtcgaattgatggaatctccgcccgcaatgctgaggaacgtagcagcctcgtcggaggccacagcccgagtgtcgaatcctgctgggtgcatcttgccttttgcggcgaagtatcgagcggcggaggccgagagatggtagaagtcgacccagggggatgagctacgggtgcggcccggcgagatcactagctttgtgtggtcggggaagttgaactggaaggcaccatccccaaaaccccagatgccgacattgcccaagcgctggtagaacttgacaaactgggcactgttgtgttgaggtagatcttcatccataatcccctcgtcgccatgtcgaccaagggctccgatcatgtatttaccgaactgatccacaagtttcatcctcttgattttctctgcatcggctcgttcaatctcggttcctgtgttggaacgaactctcattgccttcgagcttttgacatcgaacagtgagggcgatatcaaagctcgtcggatgccgcggcatcctagcagatcatcgtcacagttctcataaaattcaaccgaggttccagtgcgaggaactaattgatcagcctcggaatagtaaattggcttttgcttgccatccacgacgctacgggcttttcggcggatatgtctctcgccatctcgaagcacgacactcgttgccggctgcccgttttctgccttgaaaacacatccaacgctgccatcatctagaacatacccaataccataacggttggtatagtcgacccatttgatgacataggcatggggctgttttcgtgctccccctctgcgtctacttggtgcgtggtcgaccaggttggtcagcatgagacgcaagtcggtgttgacatcggtcaacgaagtcctgggtagaagcttgcagacatctgctgtgtgaaatataggactgagccccaagctagagcgggctctagtgccagccgtcttgccgtcagaccgagcggtaccattggagtttgatcgaccatgtccattagattcagaaaacttcgactgtgccagtgaagatgggctggctctccctctgtcgcctcgtccagcagtagtgttcagatctgctttggatatagaccgtagggatttctgattggcgatcacgtttcgctcctccagcctagcggttggttgtcgttctctggttgaaatagaaggctgcatcagctcctggtcagcagctgccaatctgcgagactgagagcgtgttttgcctacagtcaagcctgatggcatgcttgtggatttggctaatcgtggagcaatatccttgtccttgctacgcagcgttgctgtcgctgtcgctgcttgggtagcggatgccatccttcgtgtccggataggacgctctgcgagccctccaattggcacttccacagcgggcagaggttttggctcggcttttggactatctcgatatggcctggaggacagaacagcaggatcggggaccacaggtgccctccgaggagagataggtggcactcgagcttgctgtcgtagcgttgcggcatggctttgtccttccattcggcgatgttgagcagcgacgagagcggcattggtccgtgacgctgccatagggttgggacgagcagaaatactccgattggacatagtgctgcttttaagcatcgactcctcagggcgcattacctttcgggacgtctccaaaacacaccagtctccatccaggtcttggggccatcggtaaacataatccggcgacaagggtattacgggtcgcagacctctggagtcctccacatcacactcagaaaaggccgactttgcgcaatttctgccaacggatttccgagccgtcccgtcaggcttgcgtcccacgccgcagagtgagtagaaggccgctttgcaggaatgatatcgctgagcggggtcgtccacctggtacacgtacgcgcggagcttctcatccgagtccaagccgtacccatgtaccacagaatcgccttgaggtgaagcgtccctgagccatagtggcttattgaatcggcacgaggggtctagttgacgaggaatgcaaccctcatacatgttaaagaatgggtgctcaacaatatcgtctgggtctggtcgctcctcgtccaccaggttcaagcaacgactgactagatcttttgcttcctcggggatgtagttgctggactctgattcattaggccagacgtaagtcagattctggacttttttgtaaacttcatcttgggttttggattgaaagggtaagtatcctgcgagcatggcaaagctaaatgcgaacattagttcaacgacttcctagtaatatcgcggtgttcttaccatattacgcccacggaccaaatatcaactttctgtgtatgcccgcctttgctcttgtccaaaacttcgggggcgatatagttgggtgtgccgcatagcgtgttccgtcgcttggcatccttgtcggacatgatcatagccgccagaccaaaatccccaaccttgatgttcatgttgtgatcgaggaacagatttcccatcttcaggtcacgatgagcgacgaagcgtttgtgtaggtatttcaccgctgcgcaaagctgaatcatataccggcgcacttctggcaagctgaaacagcgtcgtttccgaaacatgtccatcaccgagccattgggacataactccaggacgacataggtgctggatccgaaagcgaatgcacggtagaactggacgataaaaggatgacgcattttagaatgaatctggagttcggttcgaaactgcgacaaaagtttaggcactgtcaaatgcttggtccgtatccagaggctcgtaccttctcctccatctttttttgagacatcgctgacttgacgaccttcatggcatacacccggccatttcgagccaatgtaccctcataacaaacagcgaaaccgcctttccctaagaatgcgcctatcgagtatcgctcaccgccatcttccggctctgagactatcgacggtggcggatcggcgtagcttttggacgttgcaagcttctgcttgttactcggaggcggggcatttttatcgaacggtttgcgatcaatcgccaccttcggcttgatcatctggttcgtcgtgcgcggggagagggcctccatgattggaaggtcttcttgttatgacaggcgaaataggagaatatcaccagctgaacgcgtgtaacggaaggggtatcgcgcataaagatcattaaacagtgaccatgtgacggtctgcaaaagggtatcaagttcgggcaatattggtatccctgcaacgaccaagttagacctcagtggagagctgaacacagatagaacttaccaaaatgcaaagcgctaaagaaacagaaatgtacaaagcttggaaaacaaataacgacacctcaatcgagggttggggaaggatggtgaataaatagtcggaccataacagtttgctcaacgcggtaaacaataaacactggccgttggcccgtgtggtgtggtcacgtgagccccgttgccagcgcattgtcttcggtagacacatacccacatagtggacatgtgtagatttgtctaaaaatatgaagatattcgatttagcaagaaactgtttggcttcaatctcgatgtgtttctagggctttatattagggttgacaataagaaatgaagtacataaatctcagccgcgaatttaactttacgaccacgaagtactgtacatattatccttgcacttttattggctcttaaggttgcggctatagttctcttgaagttgatcgaaatggggtttatccttagcttccagagtatatcttactgttgtatacatattctctatactaaattatcaacaagcctgactccagtggcatttcatgagaatttgccccagtacttctggcattgaccgctctttccacaccgccgatctattcctacaccccgcgcagggcacgcgtgcgcgatgatgcgcgtagtatagtatgaagttttctattggcagaggaaaagcgggtctcgggccttcccatgtacataccggggtgcaaaccctggaatactaatgaaatatgactgtacagcgggagatcgtacataaaccttctcaaaagcttaagcttaatcttacctagtatgtaagttgtacagagtatctatgtaaaaactcgcagcctatgcagcggccaggtcccatggaaacggtttgagaatatgcaggtctagagttcagcttttactaaagtggatagacaacaaccaaaaaggggaagcccactatcccaacgggctggtttatgactaaatatagttaaaatcatctcactgcccacagatttcggtatggatagataggcaattcagcaataatgttgatatgtggatcaaatcctgatgtttagtctccacaacccagccatctaggtacatgtcttactagcatgtcgtcattatatatcataaacccctctcagccattcctcggccaccacgccaatgaaaccgctaccaacaacggccaatgtccatggattcgccaagtcccgcaaatttggccagaaactatttttctcttcctgccactgttgcagctgcctatacttatctgaatcctgagaccgatagcgctcttcctggctagcctcaatttccttatcgccacccacatatcgaaggaataggtagttcgtcacaggtcctagtatgacaactggattaaatggaccagccatgttgagtagggcaaaggagaaatggaccaaagtgtctccaagataactagacaagcatcagtccatgtcatcgaacgcaaagggtgatatacatatcacgaaaacttacttcggatgccgcaccaaactccaaaccccatgtcgacacaaatccgtccgttctcgtcgatgcagtgcaagctgcgtatctgccatagcctccaacgcaaacccagcagcaaaaagtccaacaccaagtgcccgaacaacattcaccccgtcattgcctatcgggagcgtagctccacccatagtgaacgggaccgtgaacggcaaagagatcacactcaatataacagcctccgggaaaaataccctcataaacccacgtctccaaaagttccgctcttttttggctgcgtcgtaccgcgcatcatctgtcccgcgggacaatgaccggcacgcaatccgagcaaagagtctcacgccccagatagtaacgcagcttagcagaaccctttccgaccatggtagagcctcacaagcttctctgaatgagatcttgtgttttaaaatcgggtgcccgatggcggtccaccaggcattgaggacttgggcggagggccagagccagtctttgagttcgactctgtctgttacttcggctgcaaggtatgttgcgagtgagaggctataatacagactgaatgacggtaggagggttgattttaggattcctacgtcgccgggtgtgatgttgtttctgaaggatggggattggagagcgctaggggcctggttctctaggacagaggggggaatgaaaaatgccatttgggacacgatctggaatactggagggttggctacaaggttaatcaatgtattgtgacttagttgtgctgctcagatgttgatgtcaagattatgtaatggccaaacggagttagacttccgcacggcccagtaaaacacgtggggccccaaattgggttacaaacaatgcaaacactctaactagagttgagcaactataatggacatcgtctcgaagcattcttcggcaaaaaccatgacaagcgctggacagtcacaatttcaataagctatctgaccacgggcggaggccacgggaatttgtaccatgtgcggtctagtagaagtatttcgaactggaattggcttgatatatcgctgcggttgaggtacatgaacggattttatggtttgcctgatcttaagacatccaccagtccttgattctttccagagatgaatctttaagtgtattggatttgcctatgtacatcgatgcccatgaaccacattaccgatttaaccttgagaacctgtacccgcttctgctgctttgactgctctctgataaatagcgacagttccttcagatactataagcatcttttttagttcttcgagctcctctgggtcctcttcgttttgagtccttgttttccaatcgtccacttcggcgcgcgcatcctcaagctttccccgcaagcatgccatttccgcgtgcaccaggttttctccttctagcctatgatctgtatcttcctgcagtatatatacacaaaatgacctcgcttgcgccacctcaaatgcatctccattaaacgcatcaggccacccattttcaaggtacatctcccttaacgaaagaatggacccatcccattccagcccggtgttctccccactacctggaatccattctaaagagcgatacgatcgcaaaatatcccgaagagccgcctcagcatttctgtgcggaatatgctcaaagctattccgattcaacgactgcggttctttcgtcggatgaccttcaagagcgggatcggtcgtgtcccagctctcctgatcaataatccaaatgacatgtcggcgtgcatcatataacatgacgctgccatgattacccaggctggtcaatggtgtgacccagggctggatatacgggccattttcatcctcgaaattcggatccgagggatccccataaaatgggtcgcggcttcgttcggcttgctcgatatccctgaaatcggtaaactcgccgattcgagagaatgagtctttccccgcagcaagcggatcaatatatggtaggatgctgtagagatattttattgatgagtccaggtcgagctcgtcataggcagcctccaggtgggttaggttgtgtggcccgcgcctaattcccgcgcgttgaatatagcgcattctggaaagttcctcgtatatctcaagcataaggtccgccactttctggagacgtgctttttccgagctgagcgttgtcatgatgagggggctagcattgataatggatgttcggtatcgatgcactggaagcgctaccagaacgatgaaagataccacacagatgaaagtgcggaatctcatggcaagaagatatacgatgagatgcaatgccaatgttcaagagctgcgatgggataatgcgcttgtaaagcttgatatattcgcagattacggaatcaaggcggtgagaatataagaactctgatccgctctctgaatattaattaccatagaatagttaacagacagttttgtaggagccaatacttgagaaatactaccgacacggcnnnnncaaaataggtaaccaaagtatatgaagtcatatagccaaaacaggtaaccaaaacatgtgaccaagtcatgtgattatgtcaggtgattatgtcaggtgatttttaggtttgatcatatgatatactataccataataaattacaaaggctggtcgaaaattgcggccagcgggagacttacctgaagtagtatggcgggcaacgtgacggtagcaatttccgcgtgtcggtagcatttctcttctccaatacttaatggtcattaggcatttttttcaacataagcactccttccctaaacaccccagaatgatgacggtctgatattccatctatagaatataaggtaatctttaaagatgtagataatatgagacatattaggagtaagtattcgagtatggcggtcagaaaagaccttggaagaggtattcagtgggtaggtatagctagcctgaattgctttgggctatttgcacatgcggagaaataatggtggcaagatcaatgtgcatattcaaaggctttgattgatccatgtttttgtatttctgcttcatgagaagcatcaactgttcattccagaacggcacgcatgtttcaagatcaggtgtcgagaatgctgtagtttcgttgtcattctcagtatatagattttctgatatattgcacttgaacaagttcgagccggaagataagtcgaccgagagcgttaaaccgagatcatgaaggtcggagccatcaggtatacgttcgaagggaagtcggttggtgggtagtctctttgcctttccgtcctttgtgaaagtttcgtcggtagaatgatcccttgcctgacgaatgaggtatgctcgtggatcacgaggggaaagcgttgtcgcagagaccggctcgctgaccgaagcttgcgacgaagttaacgcagcttttgcggcaagataccgacttttatgaggcgaatgaaattctggagcagactgcgaactcgatgttttctcgttatcgctgacgcgcatccgactgttctgaatagcttccttcttcctcctttcgaagtctagtgctttctccagatctggactgtccgaacaaccatcgttctgcccatcgatatgcataatatctggcaaattgttcgtgggcaatccgaatcgttgctgggtaagaaaagaaagcggtgagtctggttcttgagttggtgcttcctcagtagggcttttctgcagcgagacttgtgttgttctctgaaaccaagtgtctagagcgccgttcccataccggtctcgatcacgttccctctgagcgcgtcgggcgctcgaaatacgattagtttcaggggagcactcggtcgattcttgtggatgctggcggcggcgcttcactggcgacccagatgcaagtcttgaagtaagaggacttatcggggctgagttgggcgaatgctggacaactcgcggttcaccctctctttggattggctcctgcaggctaccgctagatagatccacggggcttgtttgattgaggtaattgtttccgcgacgcggtgtttgaaacgaagcatttattctggacacagaccacggattgacgaagctgggttgcttacttctgacagtgctggaaggaaccgggggcgaaagggcttgcggattctgtgagagaggcgtgcagggtgtagctaaactaaaggggttgtcaggatcaccagggtgtgcggcaagctctgctggcttcctagccagcaaaagttcgaatcctcctgagctctcattcggtttgcaggaattctctttcccttgggtggaatttctcgtctccgttccgtaatggtcgcgaaacatattctctaccaaggccaagactatatcttggtcttcaaacaggatgttgtctttccctggctcgatattgacgtcgtacgtccctcggggacagcgaatttgtaaacagagaaaaggatcgctggactcctttaagacgacacggagatgctgcttgaaatttttgacaatctcgtgggcaacacccctgctgttagacagagggcggccatctacactgatgaattggcctgcattgttgatcttcgccgtatctgatttggttggtaaccacatcaatggatattcaacaagatgagcttacccaattgtatatttttcggaagaaaagccgcagcttcatatcctgtctgatctgatttttctttcaagacacaggaagaaaaaacttccgtgccagctatctttagaactgcgtccgagagcgacgcgtctgcgctcggcacgtagacccaattgctattttcaccttttgtcttgaggactttgaatgagaacctcttcaacggttgagctatagcgtaggcctggagaagtttcttgatcttcgtaagactttttgcagcacccttcaagatagtctgcctgcggacaggtatatgcttgagaaattctgcgatacgaacagttgtgcccacaggatgtgatgtccgttgtgttctgcgatgcaagtttagtagtggcacagaggccaaaaaatctggcgaggtcgacatacccagtaagctctccgtttcttccatacttcaaacatcgtccggcaacttcggactcaactcgagtggtgacagtgacaagcccagacatctctgcgacactggcaagtgcttcaccacgaaatcccaatgatgaacccccgacgtttttgagatcatctaaactttggatcttgctggtaaaggctcgtttgcagacattttgctggtcctctggagagattccgtggccattgtccttgagttgtatgacatccacggtattttcggaaatttcaacctgtaatgacgtggcagaagcatccaaggcattgtctacaagttccttgacaacagagcagggatccgatatggcagatgtggagccaatcgcccggattgtcttctggggaagagcctcaattgtcatcctgcacgcttggtattagttgttggtattagttgttcatctccaaaagcacaaattgtctcatccaggtgaccgaaggccagaaatacatgcgaacgatttcaatggcttatagttgatgaacgtggactcggcgaaggaggatgggaggatgatattgtcttggcatcctgggtcacgttatgctaatgccttattattcaggccaacatactctccttgtctaggactgtgccaatagtgttttactgcacttctgcgttactgtctcttccctatcgcgcaaagcatattccattcctgaagctcatggatttgattattgctaaataatcaagaatgatcttaaaattaggccttttcctgccttttcctgccgtctacgagacctctcaaaagactgctgggtcatgtggttctcaatgacgaaggcctgctcaatgaaactgttttgttgtccaccggtcgctatatcttacctcactctttcaagcttcgaacatggaggttttagggttccgagtttgtacccgcctagtccttttcatcgtaccttttgattctcttcatcctgggcttcaaacggagaacgataataactcgatcactttatatcaatgccggccagcatgatactcgaactccaacaattcccgggtggatttcatcgcccatagtgcctactctagagcgggtgttctgcgacaatcatcgacgaggcacaataggcaaattcatcaaagttttactcgtctcgcctttcagacttctgtgatcagtccactgttacaattactcgacagaggcatatgcaagagacaggagacggactaccatactcgaagaagaaaatcattcctggtgtgtgagtgacggtctcatatcttgaggcgaagtgctgtggataacatcctctatgttagagatgacttcgccgaagcaaaggatggaaatcatatcttataacatggtccaacacgagctttattccttcttgagatcctttcactttccgttcatacgagcatcatccacaatgcgtgcatgacgctagagtcgaaaattgcagctacagcaagtaataccttcacgagtgacacaagtcgttcagcaacaacacagcggattattaaacttgaattaagacgtggcgtcagtgattcaacggcccaaatgagtggtaagctatgtcatagggttcttacccttatgactttgaatatgacagccaagttgaagcaattttatctaaaacatgcaaccttagatgcatacaacaaccttcgaaggaatggtggatgactaaagttctgcctggcaataacatccaataggaaggcacatacagcctcattagtcatcatagtcacagcctcaataaacaacgtccaactttatgcctctgcagcttcttagccttgctcactcaaacggctgaagacgccgaaatgttgggcgaggacttttcaatcactaagctcgcaattcccgccgtcagtgttctaatcgccttcctcgcctacacatcacagtacttgtttctgcatttcgagtctgcgcctctcaagagggacgaaatttggaacatcaatatcttcgctctgtgcatctggatatgctattatcgaacctgctttgtagatcccggtcgacttcctaaggctgaagagcgaccgaaacccaaagagcaagaaggtgaagcactcgctagtcgccagcgatggtgtcgcagatgtgaagcttacaaaccgccccgcgctcaccactgcaagacctgtaaaaggttagataaggaatgcttgatgtggaggattttgctgatcttcttctagatgcattcctaaaatggatcatcattgcccctggacctcgaactgcgtctcacattttaccatcccgcatttcatgcgctttctattctatgcgactgttggcatgtcctatctggaaactcttctctggcagcgtgcatcatttgtatggaagaacagtcatctgccaagcgtaagtaactctggtacttcttttcatcattcatgcggctaatgttgaatagtatctcggccccacgttggggcagctcatccacttgttcatactgctggtagtaaatagtttcacgactttcgccctctttgttctcctgcttaggagtttatgggcaattggatctaacactaccaccattgaaacttgggaaatcgagaggcatgctactcttgtccgtcgagcccgtgtgctgggcgggtatcttgagggccctggaggaattcgagttcacataaaaaagcaggaatatccatacgacattgggatctgggccaatatcaagcaaagtatgggcgggagcgcgaatgtgagtatgcctgttcatggtccaaatattgacacgcaaacacgtaagctaatgtctttttaggtcataagctggttctggccactggccgcatcacctgatcgccggtccggctgggaattcgagaccaatgactttgagggtgagtggttgagtcagtattgtgggttttcaattactgatcttttttagatcctggtgtatcatggccacctccagacccagatcgaatcccggtgccggttagtacaaggtcggataacattagtatgcctgcatacgcaagtattcaggacgagattgatgccttcaatcgtcgtaaacaggaagacatgaagcgattccaaagtccgggtgtacagcgtcgcaagccatttcacgaccggtacaaaaaaggtgcctacgctgaaagtgatagcgatgagtccggaactgactccgggggttattcagaagagggcgaagagtcttggcgaaacgccgaaggagaacgactacgcgactttggggtggacgaggaagcagaattctatgatgaggaagacatccctcttggtgttctcattgagcgacggaagcggcagcaatctgctaattgaaccatttccgacaaaaatcatctgtatcattagatctttttcgcaatacccctgagtcgcacatatcccagccattggctcccatcttcaccacgagttatcacgtcctggagcacatcgcaaacctggcgcactgcagcatcctgcttttcctcggggagcacgtccaagaactgggctcccatcagtctaacccatccctccagaccgcccttggcgtcagtggtgagttttgttgggcggtactctagctcgacgttctcgaccttgaaaccgatctcttcaagagcatttctcatccaggtatcagatgggaagaaccaagggcttgtctcatttgcttgtttgacagggataccctgctgcaccagtgcgcagacaagggccgtcttaacctcggccacattgccatgtccgcccatttcgaatacatatgtgccgccaggcttcagacagccatagattgcgcggagagttgacatgcgcgtcgactcatcacgtaagatccagtggagggctgcgttggagatcctgtctggttgttagaggtcgagttccatgcatggtggaccatgtattataattaaagacatacactttatcccatgatccattgacaatggaggcttctttctccaggtaccggcaatccacaacgcggaagctggccttggggcttgcgtagtctttgttggcagactcgatcatagacgcagatgagtcaatgcccaagacggattctatggcggggaggaagtttgcagtgaattttccatcgccgcaaccgacatcaagcaccttgtctgttggcttggggtctagagaggtgaggagttttccggtgattttcgcggagtgcacgaaggatgcagaggcagagtatgcctaggcttgttaattatgattcacacgtatcgccgggaggaatacatacttcggccgaccagtggtctttaggaccctccgtattggacgccatggtatatgacaggtgcaaatatggagaagtggggaagtcgtagtcttggcgtggaatatcagtcaggaacaatggaaatgatagtcaatcaagacgtgagaatatttcaagagttgttcctagtaaattctttcctggttatcgaaaggtttgatgggctctcttatatgttttctctgtagagtgggcagttattcaaggtaggataacgaggccgatatcggaccggagatatacttggccgccagtacgggcgactacataagtgtaccatcagaacataactctctcattggataatattgccaggcatttagatccacccccaactgtataatcagagctcttccacctggacactgtaatgtgatcatgtacgagcacgtgccctgtcatgtgaccatcacggcccgtgcggtcccgtgcggaccatcctgccggtactccagttcttctgtggcgcggacatttagtaggcgaggcgtatagttgctgttcctagaggagtgataacacttgcttgaggtgttttcggtatttctcgactgaatctgaaaagatcaggatatcaacaacacgttacgtccccttctcgggcgaaacgtaggggtctaagagatgagaagactatgggatgactactgagaatggaaaggtggaaaggtgtttgcgttgctatctatgcctcgggagtgcttttctaactatccatcacatgaccgcctagtcatcctgctctggaaacccccactaactaactagtgtgtaggatggtccgcaacgggaccgcatgggcccgtaatggtgacatgacaggggggatcacagtaactcaaatggcttccaccactactaccaataatgatattccaattgaaaattgggtttttatgctagatagagagtattaaattagataaattcatccggtaattaatcataattatggtgtaattctacgaagaacgaataccagagccctttgataattgtacatacaacgatataaatcctggaacttgggcgaaagcactccgataaggtggtgatctatagcggtgagctactatctaataacagagttactccgtatgtatacttgatcgtccgtacgcctgcatgggatgcacagacctactacgtatggaaggtctagaccttttttcttttcgaataacttcttattagagactgacagttatattcaaactacgcagcttatacgggctgtacgatttatactagccaaaccaattgatatagtgtccgggcacatcacatgtaaggatctatacctacttacatgtcaggattacaagacatcactgcttgcccttacaactaactacgacccatacccctttctctcctgaaatgctcaaacaacaaaagtccagtccagacttaaaactgcaatcatattgggcacctagtgggtacacggaaatggcaatggcgaaacaattcccttgagctccactaattcactgggcgaaatcccccctgacttctgcaaagtagtatatatatcaggatgtctgatctaacaagctgcatattgaaatatacaaaaccccacctcttccaatcaatcagacaccatgtcttaccacggccattgcaattgcgagagcattcgcgtcactcttcccgagcaacccgagacctcagctatttgtcactggtatgaaatcattcttgaacttacaatcatttgtcttgatggtcatgtactaaaatgattctgcaatgtagcaataactgcaagcaagcaggtggtggtcgtaagtacattcgtcaaggcagctgtggagtgtacattgcttacaactatcttagccttctctgtcaactacattgtcaatgaagatgacttgaccgttgaggatcccaatggggctttgaagatctacgaggacaagaattccgatagtggcaatgttgtgaaggtaaatcgttgtccatctcgaagtactattgtttgttcgaacaaaaaactaacctcgaaatagcgtcatttttgttccagctgcggcaggtatggaatacaaattcaagtccagtgataactatagctaacacctattgcagcccagtgttcaccaaaacccccaaggcccctggagtagtcttcctcaagggccccttgtttgacattgtctccactcctgcacttgaggtgtttaccaataagcagtacgactgggtgaatctcaagcagggagaaatcgaggcctgatatcaacacgaaggtaggatcgacatggtggtttgagaaaatgtacaaaaaaatgaatataaacattgtcctatgcgatggcgcaattctcagaaagcctgttattggtccatttttaagcataaaattcctgtcgcatttatattcgtttccacctatagtatagcttctacagagtacggagtaccttggtgatatagtgtttgagcagacgtatgtagatgacttaaagcataacggtttaaatgtggggacgggataatttatttcaacctcccatctctcaagacaacggcaaaagcgcaccacgccgtagccatgctgctctctccgggctaagactacgtataataatatgacaaaagtccctgctcaaacgtccggtcctaggcgaccgtccggtgccattttgcggaacacccgaccgcgcgtcaacgacaacatcccggatccccgcgaagcgctcgagctccagcggatccagacacgtgaggacaacgagctggactactcaacgccgtctgcttcttccggcgatgaatatcacgttgtgacgcgtcgcactacggcacgcgctctcgcgtcacgtgccgatgccgagcgtcgccggcaagctcgaaagggggcttggggcaagctcacccggttttggacgcataatattactctaacagtggcgcataagagcagtcgggattatttcggtgcgtattttgcgactgcgaccccgacttgccgatctgcataattctaactctgcatccaagccttggagagaacattcctcgcttatctgcggacctcccttaccgttgcccaacaaggcgtgctaattgcacagctgttccgtctgcaggcggcggaggagttggcggaccgtcttgggtttggtcaggtcggtacacccctgtcggtcgcgtgtcactgtgtggctattatcgtggctttggttggggcgtatcgattctggaggcagcagaatgctattgctaggggtagggtctatgctggaggctgggacatgaattctgtgggggtattactgggttgtgtgagtggtgcaaatgcttttcggttgaagatgtaactgacattggctagatcactataacggtgttggttgtttccgttgctattatagtcgaggtcgacgttcacccgtctatattttttcgacgaatattagccagctgagtgatcacggagatatgtaagtttttatgaatcttgtcttggcaatcatcagcctcatatctagactatgtaaatataattctattgatttaaggctatgtagcggagaggcactttgaaatacttacatgattcattagttcataaatgtggagttgattaattagtatgtaagattatgcatatatgtactccgtatggatgcaatccttcgcttcatcatatacatgagaggtcgttgatgagaagtgtcgttgttcggaagacgtcgttagtaagaggcatgaagctcctcttcaagaatatgccattttctagcaacctctgcccggtcgtcagcggtcgatgtccgcatgtcttcaatgccttgcgctatccgagatgccataatagaaagctccacgttcttgcctagcgacttttgaagttgtctgcgaattccaaccaagggatatccaaagagtccccagagacctagaatgttgagtcagaatgagattcccgcggcgaaatagccgttgggtgatgcatagcgttaacatacctgctggtggcttgaagataacacccccaatccctttcccgattcccttgatcattcctttcgctccttgttgcttggcgccaatctgaggctgggtgaccagacccgtgataccgtaataaaatccatctcgaagttcctagaaggtcaagggtcagacatgatatttttttttcccatcgaggatgagtgacataccgttccagctgccgcgagtccactacggaagcccataaccttgggcatatctttcaccattcggtcgtggtacaacatcggcgcattgtgaaatcctttggacaagctgagagtcaagtctgtcgggagccagagtatgctttttagtaactttttcgacattcgactaccgtgagtacgtatttcgtagataacaccctgcccatggggtgtctctatataactcaatagtttcttctggtcaatcggtatgccttgtttttggcccacggcactagctggtaactcatggttcattctgttgtgtcttatgtggtccttctcgctgtcgttcgtgtcgaggttcatcaaatcattaccatttgatccaagtccatcatggcactcggcaggcccatgatactcggcaggttcatgatactcatcgtcatcactatccaggcttgaatcatgacttttgcgggatttgccaaatgaaaaccttgaggaaccactgcgatcacgagtatgacctattgcacgaccggcctcgacaaaatccacaacgatgtcataagggacctcaccgatcccagtcacgaagttcgcaatcgctccaactagcacctgagctcctgcgctaattgggccgacaggattacggtatgtgtcatattcctctgctcggttcctggacagttgattagtggtgtgaaatattttggcaaaggccaacctacaaagcgacatcctcgggtttgatagcccccatttcaaccagtactgctgcagcaaaggcactcagcccaatggaagtttgcttaatgtgccacacagcaggacgagtaggacatattgcgcattgtaaagtcttcaagttaagatgacgatgaaagctgcgtactccatcccgcacaccggactctgtccgcatcttatccgcaatttcttgagccttcgcttgagttgaaggtagcaatgctgtcttaattgcatcggtcaacttctcaactgtgagttgcttgtacgggacaggcatcggcccggccccagccatcgccacgattcctccccagaattgttgatctccaaagaagggaacgatgatcgtcggacgtccaagcgcaagccctgcggcagtggtacctgcaccgccatgatggatgacgcatgatacgtgctggaataaccagtcatgtggtatgctgccgacaatgaggatattatctggcacgtcggcatcgtcgattccgaggtttccccagccttttgaaatgattgcacgttgccctgaaaggtttatcgcttcgaacacgattcgagttagcttgacttggtcttgaaccacaattgagccgaatccaacgtagagtggagtgggccctgctttgaggaaatcttcgatctcttttgggggttggtagtttgactttctaggtagcacacaaaatccgcaaatatctatttgatcaccccagtcggctggctttggcaacaatgccggcgacctaaagcaaactataattagtgaatggtccaaatctgccaatttcgggtcaacccataccacagatatgagaacggaacgccgagacgctggggcaaactcggcgccgtgatcgaatctaacggatcgagtgcgaggcacttcttccgccacgagttcacaagatctcccaatccttcccaaatcagcatatccacaacggaataagacacgaggtttgcgactgttggcttgcaatcctgcgggtggagaacggctaaaggatgtggaaacgactgtgtaggcgaccagggcattctataagaattttattaggtatccctcaatttcacgcctggaagtagactcacgtaaacatcagatgaagtggaattcccagccgctgtgcgcaatgaacatggcccaaactgggcggattggcgattattgcatcggcaacaaacggcctccgacgataatccacagtgtcactccagagatcctctttgatttgatgcatatctgtgccgtcgcctgtttcaatacatgacctccaacagccgtatataatgtccttcatttcgcgccggcgtttttgtatggcaccactgcgaatcgtgctgaatgcggggagtaaggatgggttctcgaccatgaatgccatcagttgttcggggtctccaccgatgctgaagaactccaagccgccctcaagtacaaaatcccggaaatagaggtgtgttgccagacgtacgcggtgtccacatgccttcaactccttccccagcgcaatgaacggctggatatcaccccgagatccgataacttgtatgacgatgttcagcttcagtgggaagtctttgcccttatccttcggtattggttcaggggtcggtttgccctctagatctggtggccgagttgtcgtttggatgcgatgtaatagccctgctagttgtggcatatgctcgttgattttgatatcaacccttccatcgtctaccagcattaccgttagcgacggtttgtattgcttcacttgatcacgaactcaagactttgaccccggcatttcgcccctctccactgacatgcttccgttcgcggtgtggggagatcggaacgctgacctccccaggccagtcctccgatcggattgacccatggcgactggatctgggcctcaaagttgttgatgccgagtccattcttcgcgggagatcgacgatgtggccaactagagtgacacagttcaaaattggcaggggggatcagtgtatgttacactaaattataaatagtaatgagtatgttcatattagaattgtttagaattggtcacattgtgcgggatcaaagacattaaaaaagaatatgatcagctctactctgatgatgtcagaagggtccgcagtctattaccgccggtgcgtcagttcggattatgccagcagtatagtttgtaatacgagttttatacatcttaatgttatgcataacttatcttgctgctaatacccaatgctataacatttttttttcaatccgtacgacttgatccgttaacttatagtcatgatatagaaatagagcaattttctcttggaagtcatgaaaggccggtgagcccggtcaaaatcttgaaaatgtcaagtgacggtaatcagagtgccgcagtcccgagtctcaggccttcccggataattccactgcggatcccgagctcgggatcaatttggacctcgggatccctatggattagtcatctttatatgcagcccttgttggacattctcttgtgcaggttatcgaccgaggtcgaagatcattgctatccatgttttctatttcgtgccaaagattgtctgagacattataggttgcacacttcaagctgtgtctgtagtaatgcgctcggtaggatgagctggatccttgagctacttgtaatagaggtcgacgctctggatcgagcatattatctgcaaacttgcgtttaaacttcgaaatctcgcaattttcgagcggaattaacgggaagatcttgtattggcttatcatcggaaattttctccgatatcaagccgaatatcttccacatcctcgtcgatccagtcgatccattctgttgccttgaccggctggtcagcatcctttgtctaaggcgtaccatcgaagcggatgagcggttcgatgcttatgaacatcgaaaagctcttctcgggtggattcaaccgttcattgcaagtacgatgttcagccgctgagattcttaggtgtctccaagggtgacaggttggtctcccctcaggacatatattgacagctcctgggcatagagaaggttgctttggtaaaacatgttgaatttaagaactggggatgggagcgcttaactttcctatgtaggggcagtccagactccaggccaagatccgatgactcatctggatccacccccggctccggggccccaggaccgccacccgtgggtgggttcctttctccaacattggaggacctgaatgatattggctatagcacaccatcctgaggtagctttagataatgaacagagcactctattggccattcttaggtgtattttatctctaaactccgaaccttgactgcgatataggaagattaagatctgaggcatagcggtagcacctgaaccttttggactcatattaggccataggctcaaataatgggagcctgctaggagaagcaacccgtggccctttagccattgctttgaatggtttatgaatcaatcaaatcatatcatatattctatacagtctgaaatagaactacatgatcccatggatcttctagggctgcatgtagttatgggcatgtcctagttgacattagaagcttacgatctcaaagcactgatgatgtagtttagtatgctgatgtgcagtctgtatcatggttatggcttgcgatgtatgcttaatacctgcggtttttcagctcgcgccattctaacgagacgtattagttttcggctggtatcataaaccgacgcaatagccgtgctgaccttggcaaaaagaagttcgggctcatgagccgactccttcgcaagccacacagtcgaaaatcccatataacttgccttgtgatggacttcgtagcttataggtggatctgccgggtttgcgtcttgatgactcctgtgtatagaaaagattattttggcgcagcacacctatatctatgttcaaatgttgatcaactgagggcagggaggcacttagtgtggagtgaggacgtcatgggctgagaagtcatacgccataaatcagccaagttgcccagccctgcgggaggtgccgaggtttgctggtttatcggacaagcgggactggcccggggtaggacccgaaataccccgtgatcaccgcatggtgtaccggatatggccagcatttgattggttaagtacacaaattcaccgcctcactttccttcgctccttcaatgcccctattttatgttctgatctgatatatggcttacggtatgagaggcgttagggacatcatatgggggccctttggaactctgtttagaattcgttttgggggctttttgaggggttttccccatcttggtgttatagctagaaggatagagaagtttatacatgatatacatattcagaaccagctatgcagaaattgaaacatacatggctggaatggcggttcaaaatgaagagttcctgctaaacgactttgcaatataacatgcgatatcaggatcttaatctatcgtaaatctggagatgttcatcctctaccaaattcaaacccaaccaaccgaccgttcaaccaattagacaacggttgttcaggtgcgctgctatctcacgctgtacaccgtctgactgaaggattggaaactcattggcacccgcagatcacttccgaactagacagtcatgatattcgtggggtgccttcctcgccaatgatactgaaagcggcgttttttaccggctatgggaaaatggtgtccgagccggaaaatggtgtccgacttggtgacatcccggggccccgcgaaaagcctcgagattcatggccaagcgggtcttccccgcattctctcccggccgatggcgtcaagtcccaactctaagtgtcgaatgcattgtacgttcactctaaagggggcaaaagagttggggtaattgtagtggctgtggttggtgtaccgttgaatgaaacaaggttcacattccgcagttttgcttatatttgaaagatatcctccattgtttctttctcaattggatactaagagcctttcttaggacaactacctcattcttacccactttaaatatcactgcttcttagctaccgggcttcaaggaagaccatggcggacaagaaagactccccagagagcgaacattttgaatccgaaataaaatcggaccctactactctcatatcaccccttggatcagaaagaaaaccatatggcgaaactggtattgcttcccctactgtctctatactcatcacatactaatctaccgtcgcaaaacaggcctgaagggcatcctcacaaacaagtatgtggcagcatgcgccgccttcgcaaccctgggcggagccatgttcggctacgaccaaggtgtcatctcaatcactcttacaatggaccaatttctcgaaagattccccgaagttggtcccgatgcacccggcgctggattccagaaaggaatcctcactgccatgatcgagctcggagcctttatcggagcaatgaatcagggatggattgccgacaagatctctcgcaagtggtctatcatggttgcagtgataatcttcctctttggatccgccctgcagacaggagctatgagtttctcaatgcttgtaggtgcccggtttgttggaggtatcggtgtcggcatgctcgccatggtggcaccactttacatttctgagatcgcgcccccggagattcgtggtactttgcttgttctacaggagctttctattgttactgctattgtggttgctttctacatcacctatggtacacgatatattccgagtgaatggtcgtggcgccttcctttcctcattcaggtatgtcttctttgttaaccatgattttccctaccctaaccaccgatagatgattcctgccgtattcctcgccgtcggtattccattcctaccatattcacctcgttggctcgctggccgaggccgagatgaagaagcactcgagtctctctgcaagttgcgcggtgtcgaccctactgacgagcgcgtcatccgagagtgggttgagattcgcgccgaagttgcttactgcaaagaattgagcgttgtgagacacccaaagtgccaggatggaagttacagcagccgtgctatgcttcatgtctggagctatctggactgtttccgcaaagggtgttggaagcgtacccatgttggtattggactgatgtttttccaacgtgcgtatctgtctgtcgtggtctaaccaccactttctctccttttcctcctcacagaggctaacccatatccttctcgcagaattcggtggtgtcaacgctctcatctactactcgcctagtctattcgccggaatgggtctagactacgaaatgcaactccacatgtccggcgtcatcaacatctgccaaatgctagcctgtttctggtcactatggggaatggacagatttggccggaggcctttgctctttggcggtgctgcctgcatggttcttgcgcatttcataatcgctgtcttgatgagccaattccaatcggactggcctgatcattccgcagagggctgggtttgcgtcgctttcttgtgcttcttcatgcttacctatggcgctacctggggtcctatcccttgggctatgccggctgagatcttcccctcttcgctacgtgctaagggtatggcatactccacaatgtcgaactggcttaacaacttcatcattgggcttatcactccgccgcttgtgcaaaacactgggtatggaacttatgcgttcttctgtgtgttttgcaccctgtcgtttgtttggacgtggttcttcgttccggagaccaacgggaaaactttggaggaaatggactcagtctttggggataacacttcgactgaggagatagcacagcgtgcgaggattgaggctacaatctgggcccatgctgccgcacggtctgatgggctcgaaggtacccagcaaattacttagatggctgactttgcttccatgtttctcgaagcagtgggtgtctgatttatttctgatttatttgtgttgcttatataggtatctatgagggcttgctctcatgttataatcttctttgtccactgtagattatgaagctccttttttcttccgattttctagagtatcctcgctaaatttcccaaagaaccggagacaggccaacgaccgaaatgcacgatgatctcttctatctgatataatggctgtctatgtaggtaggcttctcaatcatccaagccatacactgtcaggtcctggctcatcttaggaagcgcccaaacagcacactccttccctccgaaaaccttcaacttcctctgtccccgaaactcaagcccgatcttctccaacaccctcgcactgtgcgtatcatctttaccacagaatccaaaaaccgagtcaaccccgagttccctcttcgcatacgccagcaacgcaagcgcggcctcggtggcgtacccctttccagtctcctcgggcagaaacgcatatccaatgtcaggcaccagataagcattcggtggctcgcctctcatcaatgatacggtgccgataggggtactctcggccaaagacgcgtgcgcatgcggcttcagcgagaccaggaacatgccatagttgtttcgggcgtagtcggcgtgcacgcggtgccgaaggaaattggaggctttctctgccgtggtgatgctggtgcgaccgcatgttttcataaactcctctgtattccatagcttcatgaggaaaagacagtgctcggtagagtcggggaagaagtaggagatttggaggcgttcgctctcaattgagaacgtgggagatgcctcgaatagagagcccatatttgcttgtttcacgttcaagtgacgtagtagctgagttgtcacggaggtggtaattgattggtaagagtgagagttgtgacaattgagaaatttagcagtagcagggatgtggtattggttacagcagtaactggtgggtgcttgaaacagaaatttattcccatgtgatcgatgcggctgagagatagggcgttagcttaaaccagctgacctatcctgggatatccttgccttagatctatgtagtatcaattgtccaatcagactttgtaatacaaattagaaattctcgttatccgtcgggagtccgactggtaatactagtaaatactattttacgaatacaaaaacaacacaatgatttccgagcccttgcagaaggaggggtacgtcctatcctgaggtcatattccttatcgcaacacgttcatctcacattccaagatgctcaggtgttatcggagtggactcgatctgatcgggttcggttcgtgccgctatccgatatccccgcattctggtaatctaggtaatattaccatgaaatacggaataaaatacatcaacagtatcctgaggtctacgtatagtacgtgaggtattgatactgaaagaggctgaagatagaggtaaatgtgggtattggtaaaataagcctcgtattatttcaccgagtgtagatatcggtagaatactactgcagatcagactcctgtcttttagcagcctgccatttccgcaacgcgtcaaagtcaacgcattcatggattactccccatcccagcccgccagctgtcagctctggtgctgtccccggtggactagcaggttccagaactaggaaatcaccgcatgtgattgagaggcggagatattcaaagcagtggtcagtatgctctgtccaggccgctgaaattgcgtccgattcgttgacaggttgattggtttgagactcatagtggcgaaagcgccgtcgaacaacattctaacggacagtaaaggttagatttattgccattcctttcgtagaaactattgtgacttacgacacagtgaagttggtgaagatttgacaggacgtagaaccgctcatccgtattatccatgttcaaaggatcagaaataccctgggctaggccataatccgatggattttgcagccagacggaatcacctcctggggatcaaagttagttttattttgccatttatctggcgagatagccagcttaccgcttgtgatttctttccaggctttatcgacagcttcaccactgccatagtatttgttgtcggggacaaatgggatttttaatcgctgctcaaaaacctcgttgggtataggtgtctttagacgtagtcctggaacaaactcaggcgtcttgaagaatgaaacgctggtaaaacctaggacaattcctagcccaaagacgacggggagaagaataagatatgccctgtaaattcttctggatacatgagatcgaagtctggtgtcccctaacagagcctcactagaggtagctctgtcgtcatcgacatgttggtgtttctcgtcatgtacactcgtaagtgtataagctcgcgacatagtcgatgacagtatactttgcagcttcatttagctgtgattgaagatgtttatagtaaaattatagaacactttcagcgaaaaggaaaaaatttagaaaaattaagccgcaatgatcgaatgcgtcggcagagtgggaaatggatgttttctaggtgtccatcttcgaaatggtcagagattcctatctcaagacctgcatgtaatagcgcacaagggttctattgatctacactaacagggattactaggtgttacgcccaccccactgagcggaaagatcggtgagtattaccggcattcatcgtaatttgggtactacttatttcaaatatataactcgtgcgattagtctgatatgaggaatgtttcccaactcccataaaaatgtgagataggtagctagtgatccctagcttagtgcatgttaaggcacatttcaatcaatgaggaaattgtggactgaggagaggcagagtcgggacagctcatgtaacatcacgagaagagttgaagtagttggcctgaaaagggatcgcccctcacctcacatctatgtgcgcgctgcatcaacacgatgtttgattctcccgaaaggaggcgagaacacccgatggcaacacgggagtagttcagctcataggcttaatgcaaggtaacttgttgcctacatggccacataggatgtggttcgcgtgtactggggttgccccaggtcgattttataaatacttggcttcttgaccacctagaatgcatttcttcatcgacgtcaatatcgaacttcaaagtatcttcttcaaatacatctgaactctaagtctaagcctacgaattgtgagatcaatgctaccaagttaattttaaacccagtatacagagactaattatacatagtcttcaatatgaggtttatcatcgctcagacagttttggccgttaccttggctgcagtagccagtggtctggccatcaattccgaggccgcggagccggcttgggtttggtcttcggcttccaaacgcgggcctgaagaaaatgtaaagcccgaaattgcggagccggcctgggtttggtctcctaagcgtgatgccgaggagaatgcaaagcccgagccggcctgggtttggtcttctaagcgtgatgccgaggagaatgcaaagcccgagccagcctgggtctggtcttctaagcgtgatgccgaggagaatgcaaagcccgagccggcctgggtctggtcttcatccgccaagcgcgagactgaagagcaagtaaagcccgagccggcttgggtttggtcttcggcttccaagcgtgtagttgaagagcatgaggagattgcagcataagggcttcggccagctgaaacgatggaatgcttcaacagccagccacgagagacgaatccaacgaaaggatgaatttttgatgacaactaaagtgggatggtgctatgtacctagcttgctctatctttatttctgaattgactcccataaaacatttcggatgctgaacaaacctccaaacgtattagattaataatttctggaactacactcatttatagaccaacatgggacacagacaatgacagatgttcccacattacttagatgatctataccaattttagtagcaagtgactgtaatgtctcctaatagcaatatattagtaaaaagcagtaatttattaaaataagtcagcattttatctatctattttaggtaatccttagtataattatactagtgtagtactaaaactagtgctgcggtagtgctgcagcactatacaacagcaccaaaattggcttagtcccgcagtatctcgcagcaccatatcgcagcaccaaaattgccttggtgctgcgggacttgtcaagctctattcattttaaccaagaaaacccttgctgtaaacttgaatatgtcaattgaagcagagtaatagcaggtagaccgtgtctattggtgcagcgaccgcccaggtgtagaatttacgggacttatctggtagatatcagttgatttccagacagcataatagccttggataattcttgttaattgtatgatagagagagtaagatctatcgattagaagtatctctaaaaatagaggctattttatcctatgttcgagagactaatatgtgcaatgagaaaatcaataacnnnnnnnnnnnnnnnnnnnnnnnnnnnnnnnnnnnnnnnnnnnnnnnnnnnnnnnnnnnnnnnnnnnnnnnnnnnnnnnnnnnnnnnnnnnnnnnnnnnnnnnnnnnnnnnnnnnnnnnnnnnnnnnnnnnnnnnnnnnnnnnnnnnnnnnnnnnnnnnnnnnnnnnnnnnnnnnnnnnnnnnnnnnnnnnnnnnnnnnnnnnnnnnnnnnnnnnnnnnnnnnnnnnnnnnnnnnnnnnnnnnnnnnnnnnnnnnnnnnnnnnnnnnnnnnnnnntttggtcttctaagcgtgatgccgaggagaatgcaaagcccgagccagcctgggtctggtcttctaagcgtgatgccgaggagaatgcaaagcccgagccggcctgggtctggtcttcatccgccaagcgcgagactgaagagcaagtaaagcccgagccggcttgggtttggtcttcggcttccaagcgtgtagttgaagagcatgaggagattgcagcataagggcttcggccagctgaaacgatggaatgcttcaacagccagccacgagagacgaatccaacgaaaggatgaatttttgatgacaactaaagtgggatggtgctatgtacctagcttgctctatctttatttctgaattgactcccataaaacatttcggatgctgaacaaacctccaaacgtattagattaataatttctggaactacactcatttatagaccaacatgggacacagacaatgacagatgttcccacattacttagatgatctataccaattttagtagcaagtgactgtaatgtctcctaatagcaatatattagtaaaaagcagtaatttattaaaataagtcagcattttatctatctattttaggtaatccttagtataattatactagtgtagtactaaaactagtgctgcggtagtgctgcagcactatacaacagcaccaaaattggcttagtcccgcagtatctcgcagcaccatatcgcagcaccaaaattgccttggtgctgcgggacttgtcaagctctattcattttaaccaagaaaacccttgctgtaaacttgaatatgtcaattgaagcagagtaatagcaggtagaccgtgtctattggtgcagcgaccgcccaggtgtagaatttacgggacttatctggtagatatcagttgatttccagacagcataatagccttggataattcttgttaattgtatgatagagagagtaagatctatcgattagaagtatctctaaaaatagaggctattttatcctatgttcgagagactaatatgtgcaatgagaaaatcaatgaccttgtcatttctgaaaaaaaaagtccatggcgcctaaagcctgtatgagggactggtgtgcatttttctctctcttcaacttgcgacccaagcttagacggctttccaccacaatatctcagaacccagtcccactaattgaccaccagatatcaggggtattgtttagaattgctgtaacaaccggggcatcgagttgcgtgaagttgattttgaggggcggagagaagcatcctcggtgaggggaaaaaagggagggggggtttgaagatatttgaagggactggggagagacctaagggacttgaaagccattttcctcagaaggttgatatcggaggagtttggactctctagtactctcctgtcattccaatatagccgttcgtataaccctaaaacggagactattaccatacggcatgggcttctccatttagcccttctcggataatctgaacccatgtttactgtcgttctcttgaaacagtccacttctggttgcgctgtggggctctagtgctggccctggtagtaaacgcgggttcagactgtctaagaagggctaaatagaaaagcccttgctgggcggtaatagtctccgtttgggggttataaggacggtcatattggatgacaggagagaattggagagtccaaactcctccgatgtcaacctttctgaggaaaatggttttgtcgtaggtcgagagaaaggcgtgcttggtgttcagttccttcatataacgagaaacttggcctgtaagatagcataactattagtacacgaattcaccgcggataactagagtgtataccatacctagcctgcgacgaaatagttttccgtgtgcaatctcaaaatcctgcactcccatactcagcatatcacagtgtgcgccgggccatggggttttcactttcccaatgaccttgatggcagagacatcgttgagcatcaccatatctgggacccttgtgtaacccgctgctgcggccgcactggccttgaagtctgccgcccgtaggtggtgatgctgggcttgcagcgaagcggtgaccggccgtccaagccgctcgttcaaacggccttggaggccggtctcgtctccgaggacgagctgttcgacggacattgagttttctgctctcgggccaacaatgcgaacatcaagggtatcggtgctccaattggtgcttggcgaggagagggcggcaatgacttccctttcgaagtttggccatggcatcaactggcccacaaaatcgaccttgtggatggcgctgctgttggtatggttgggccctaccaggaggggcgggagagtctcgaggagaagttctcgggcagctagagtaatgatctgagccattgctttctcaattcgagtgcgttggtcaatagacgtgatgatttgatgagatgaatatgttactttcagtcgtaagtgctttgttcagatgataggatctcacaagctgcgaagtaatcagataagaaggccgagaaaccgatagagaggcaagtaaagaagtctgagagccagattggtgaataagaagtgaagcctaatgagctaatagagagacaagtagagaagctgagattgactgatcgagtagagagaagggaaaggctaagagactgatggagtagacaggtggagaagactaagactagagtaattgttgggattgtttgcacggggtgtattgtagagtaggtagctacatagtgtgctccttgagcttcctctactcccctgtcccagtactcgacagcaaacaagtcgtattgcccactcaccttgcacccctccctcgtagttctggcagtaatgagctaagatgatcaaaaggaacaatgtccaattacatgaagcaatgatcaaatcagactttccagtccgagatatcaccattgaaacttttgttccataggtaagatcgagggggcctagcaagatcaaaacgtggcaaccactctatgccgaaagtgcctttagccttgaaaccctctgcatcccggaaaccaacaaaataactgtagcaatacgttagtcgaactctcaatattataaacatgatgagcggcatacagagcaccggtatccgaattccagactagattccgagggcgggccccttcagggaaataccccatatgctgggccttcctaataatagtgattccatattagcattacccttggcaatagaaaggtgttcgactcacggaagctctcgaaggaaggcctcacggacacgctttcgttcctcacggtccatatcccagtacacaaaagcagatttgaaatctcctaggcgatctccagggaccttctcccatacaatccacgtaagatgccctctaggaactgcccctgacctactatcctgagacccttgcttgtatgctagtagtagaggtgtattttgcgagcatttatctttaagaaacttgtatgcctttagctcggggggtgtgaattcagtcgcttctcgggtgcgagtagctcggtccgcatcctcataacaggtgtgtggaacttgggcgtaaacgcgcataaaagcctcttgtccacctgcagcgttgtggcattcgaacagaacacatgcgtaagagtcgagagaccggtctgcgcattggtagctgtgcttattgaccagtctgtcgattacccattccgagcgggtgggcttgttgagggtgacctcgtcgcctggatcgagcccctcagggaaccatgaacgcgggacgtggtcgtcgtcgtccatgattaattcgataagagataaaagtgcgaaattatgagaaggtcagaaagcagaagaaaggtgagttggaaatgaagaaacttgatgaggaggatgaagagttgaaagtggaaacaaactatggtacttggtcacatgctctatttgcatatactgatgcgcacatacagattggtgtcaaaagcgtcaaccatactacggcaggttttagacgccatcgcgccaacccataataattttagagagttagagaattgattgagatttttctgccatatatatatttgccttactaccgtttttctgttagttataagcccagaatcgctttaaacttgactcttataaattttcacctttttatctgtcaggaccctagtactaagaaggctgatgcctgaggtattgcacctatcagggtgcgtggggaactgtggactaggcaggagccgtgtgtgctgcctgtacagccccctttaatcatatgacctacaatctgtatattatccttatatgctgcttctttagagaagtagctattagtttctaatataccactgcgtatactactgtctctatttcccgatcctccattacatacagcattcccttaggcattccatacctgggggtctcacagtatattagaactaatagctgcttctctaaagaagcagtatatgaggataatatataggttataggtcatataacccatagaggctgtgtaggcagcaatcattactcctgtctagtccacagtcccctacgtacccgggacgggtgcttccacgtaccatgacaggtatcatacttcaggcatcagccttcttagtactaggatcctgacactaagccgagtattctaagggaaataataatctaatgatattctatcgttagttcagctaaaggggttaatatagtagtcgcgcgactcgggtaattattaccccgattttcaccctaactatctatagcgtactcaccctactcacccctagtcgcgcgactgtaaagcagcgcttacccatttcttacccgggcgacacccacccaactattgactgtgtataagccatacgccggtgagttagtagttaggtgggtgactaccagcgaatcctcactgttatatgtttctacttttattttgctctttaaatcttatatagataaccaatgtagagttttagggaagcttttctttaccatacggatgtgttaatccatacagtcatagttcgattgggttccagatagtagcagataccaacaggccattgttcgctacagaaactctgccattgcgtccaggaagatcagattctctaatcggcgaatagcagtttagaagaatgctcaagattagaacaacctcgaaggagcagagcctggccttggcttcccatatcatccaaggaaatcatgctgccaggtcagattgaattttctttcctgttcaatctggaactgacgcaaaagttcgaagtcaatacagtcgtgctcgactccccatccagtaacggaagtagcatgtcctgtaaaagcattagacaagtgtatgacaataatgtatattggagagggttgactctaccttttccaactttgatcgggcttgacccttctattatgagatctcccccacacgaaattgcttgcctgaggtattcgaagcagtgcaggacatgtaaattccatttgactgcatcatgttcggtatcgaggtcgacaccgtcccgagcttgccaaaactgaaagcgaaccatattctgtgacttggagttagtcaaattctttaattagattacggacccaaacgtactagacagtgaagctggtgaaggatcgagatcacatagaaatcatgttgtggaggatcggtctcgtggggatgatcgaatggcgcgacgatgccctcgggcaaaccccatttgtcggggtcctcaatccagacagcatcatggcctataattatggagtgtgagtaagcaatgatgaaaaggaagtggtcgtcatctcaccagctaccaagtcatcccaatggtgatctacctctttcgaattcccaatgtacctctcatccggttgaaatacccttctaactggcttaaacacgtcttctggaataggggtaaatgtgccgagcggaaacttgccactgattttcggggcagtatatgacttccaatatagaactgcggtcgtagtccacccagttgcaaggattgagatgacaatgtataggagaagattccaatgcctatgatcttcaggcactggaagtgctgtatcttctccgtcattattgtttatttctcggtacttcgaatcggagcctcttggcttcaaaggccacatgttgtcagtcactgaaataaagccgagatcagagagaaagacaaaagagcggctcaaatgtttagagtcaaataaccacaagagttgcagcactatggtcaaagtgagagataatctttcgtaattgctccgctctcaaattgctacctagaattacatcctatatcctccgctaatcctgcatacctctctaatccagttgcatcaggcctcactgaagtaaggatagaaaataaacatagatagagaaattagagccctaccccgcgggccagatctgcaaatatccacatttgctaatatgaagagcatagaaaatgcacatggacccagctgagtaaccaggatatcagttcagccgatgcaaatacaatgccacctcatcctgcgatatgagtggtccatttgtaattatgtagggggctcgaaatgcagtcacttgcagtgttcgtagatatggccaaaggaggtatagaatgccaatctatgtactttggttaggttgtaatctagctcgttagggatgctacgacatgcatatatgtatgcccaggtggtatgcagaatgcaggtgggttcagctgaaagtgagttcatatatggcccaccttcattgagaaataaacagagccgcgtaattatgatcgtaattaattcactatctagaccagaactcatctttacttatttgttgcttgtttgaatatttaatacgctgtatgtactccgtacagagttatgatatcagcttactgccagtacgtacggtgcaagcgtatgaatcatgaatcataattaactaaaggtagaatattcattatgtactgcaataaataatatattcttgagacgttgagtacagacaaaactattatatgcaatgggatagatttcttgcaaagatattgctacatatacctcggatttcaagccgcgcttgatgaatttcccatcccttgccgccttttggtcgctgagaatcaagcacgcccaagtatcctgagctgcacgaggaagaaacagaaagaggctaccatgcgtccagggtaatatagatgcactaaatgggaccctatggtgtgcttccgttgcagtgtcgatcctgtcatatatacaaaataccgacctgtgtcgtctaggaggcaacctgaacaccaaggcgtggtacgtgagaaatacgaaacaaagacgcgaccccaagcgtaactaagcctttggacccctttaatgtttactgtgggtcgttagcgtgataacgtgatttacaagcgctttagggttgctacggataccgcggcttgggaaatgcaatcggggcaatacgttcaggcaagtgctcccatcctgtcaattgctgaactgtcaattgacttgtagggcaatatgcagttgctagtaacgagcgggacgggaacgaatccacttcagccatttgaaccaagaaaaggaatgctccaagtgacaagctaggcgttcgccccactaaagctagattaatttcaagctgtcctgtagtcgaacgcagaactatctgtacggttcaagcgcatttctggaatataagaaaagacgttgcagccgatcaccaccaaggcagaacggtaccgcaaggaatcggatgaatcacgggcagaggatatagtactaggagtgagttgtagatgtctgatatcttccttacgaaatacgatgctgtattatttacggccttaatttccaccctgataacccggtcttacgagaccctgccattgcaggacgcaaggaactagagaaaagtaccccgaaattgatttttaccgcatttagtacagcagatctcataggaatcttacacattctcaggtaacagacctaaaagagatagggaatttggccgagccaatagacttagctttgctcaatggccatgtccggcatgtggcccctcgtcaaaatcattcaggtcggcaggtgtatgcgtaagtctaccacctgtataccccgacccatgcactttattcgaccgatgctcgtacgcccaagaaaagatcttattgaaatcacggcattgatggacagctcccatgccgttgattcccacttcggacattggctcgaaagtagggtctgcatggcacatgagaacttgtcggatatagtcgaggcaatgatcgcggtggaaggcgacttcttcctcgtccatgtctttcacggatgagggataataggcgaaccggagaaagttctatgcaagaggttagatattatatattgaacctgaattggctccataccagacagtgtagctggtggaagactgatacaccgtagaccaacgcagtctctggattatttggggcaggtagggactcgggaaggttctttgcagctgcaattggaagttccacgataccatcaccagctaataggtgattccgtcagtcgcgattctatttctcaagttggaatgaaaggatgcactcacggggagaaagtcgtttccatatctcgtctgtcttgtttgacggcggtccgccgaaataagagtgaggttggaaagtaacccggctggtatattgcactgtgatacaaagaactcttgatcagccggctcatttctctctacactctttctcaggagaagcttttgctcacagtcttcctcgaacttggttgtccacgagtcatcgcattgacattcctccgacttcctggcaaatgtgcctgtagcccacaggcctacagtggtaatgaatataagagcattgagggcgattagccaatttcgataattgcaaatctgccctccccaggatgaccgggaagattttctagagtagttccaagggtgaggaagtaatgttgagctcgaatcacttccacctgactcaataggaaggtccttgtctgactggaaatcatcatgagcggccattgcagatttgagggggggagataggacttgtcatcaaagttgaaagaatagatggatgggtattggatgaaggatattgatggtttcccaaaatatatatgtaagagaatatgcacgagacatcagaatgaattagacctacctaatcatcctacaagttgtccaatcacttgaaaccttttaatacagcccgtacatgaagtatatcagatttcaggcgctccatggtcttccctttccgttttagtgctcaccccttgccgcttttcgatcaggcccttgattattacgtaatcgataaacccgctgtaattttcaggtccggtatgattaaattaccgccaagagcgataactgaaaaatacagatatcgcgtcctagtggaattttcgtaaggaatgcccgggcgtttcaatctttacatctctcgcctttcgtttttcgcctttagtttgggtgatgtcatatccacgaccaggtggtaataaagtggggtgaaatcgccaaacgcgaatggcgaacatcatgcttacaagccctcgataggaaggaagagctgattgtcttattccgcgcatattctcaagtcaaacggtattccgtggcctcgcgaaacgtaaatgccaaggcgacttgagcacaatcgtaagtccatgctggcctagtcgacgttttagtctctgaaattaatgcggggtttatttcatctctaggctggtgagtcagtccactcgtaccctaattgttggcctttcaagccatttagacgataccatctcgcctttcgccctaaattgtttactgatttgactacccagccaaacttgcaggacaaggcgggtcaaatgttagtcttgcttacgtcgtctccagtcactgcgcgtgggctgattctgatacaacgaaaggcgacggaaaacgacccaaatgtaccccatgtcaccgcattgcgcgcgattgccattggcttcaggaaggaggcacaacagcagcgccggtagttccagtctaccaatcgagccctttgagcgcagctactccccatgaaaccgaatatacctccacggagcatcctgagtatgccttacaggacccacaagttgccaaattatttcgccactacataacaaccttggccgcgtggtatgatctcaatgatagcaagcgccatttcaaggatgttgttcccgtcagggcgagatataatccgctattgctcagtgctattctcgcgtttgctgctgctaatcaacaccgcacccttggcgaagaagcgtatctggatattgctgaattctaccactatgatagtgtgcggagattgatctccctcacgaagaatatcgatagcattcctcttggcgaaacactcgccgccatttgtcttttgcgatcttatgaaattatcacacgttagtagttcccgacattcctaatttaagcttcctctgaaaatacagacgctaacagcttaataacaaccttagaaaacgtcagctctcagagtcacctgcaaggatgctattctctactagcgagtcagcgtatccatctcacagcagacctactcagcgcaggttattggaactacctccgagaagacatcacagtggctctcatagagcaacgcggtttaatgatcactctgtccaatcaaaatgccccagcagaaccaaccgaggatgcggactttgctagttccatcacattcctgctcggcaagattatcaaccggtgcctggcagtcgattcacaagcattagcccccctcgaatgggaagccatgaaatctgaactagacaagtggaaagcatcactcccgtcatatttcgacacgatacaaacccccgggctcgggaaacagagtagcttcccgtctatttggacactgcgaagctggcatagtgagtatactcgacctacttcttattcagcttctaacatggtaagcgtcgactctccattactaccataccgccatgggaattctatggttggctcagcctgcagctcaacccttgaaagctctacaacgcatcgacgatatggaatctatacagcggaagttagaataccacgcgacggagatttgtgccctggccctttcgagcgactccgcacccgtctgggtcaatgcttttggcccgattgcattctgtaagatttgtcaaacgttccctcgggctattctgatgaacgttgtgtatagattgcccttggcttcgcgatacccagaagcgcgtggaaatggcaggagagttggaaaagtgggggaagctgaccgggtggccggtttccattatagcggatgctctttctccgccaagcacaacctcgatgacactttagatctattaattatcacctttgtattctatggaaattctgtgggatggtagtgaaagagcttcataacactttatggtattcttatccacaaagtcaatatggatttcatctcattcttgtttgattgcgcataaagcagtttagatcaagatgaatttcaagactaccacctgtcctgtcgtttcgccatcaattaccagtagaataaacctcgcctaagggttctggttaaagtcgtaggcattgccaaagccgcggttcagatagcgcgacagtgcatccgacttgctgacccagtccacaggaacctccagctcagtctggccctcaataacaggcttgagatcatccgcgaattcaagtctcatagggttgcgataccacggcgcaaagtggactatcgaagttagaaatactcagccggaggacagaacttcaacttactcattgccaacatgactcgggggtcctcggtctggttaccgactccagcatgccaaagacgaaggtctctgacgaccaaagcgccctttggaacgacgggctgacatggcgggcgctctacacggcgcttctctacctcgtcgagcttgatgcgaccactggcacggtcgccgtgttcgccctcttggagatgtagacctgtgtcattgtgtgttcccagccatacctcagtagagccattcgccggggtcatggtgatgagagggacattgatgacgtatgcaaatggatgaattggatgggcaaagtctgcgtctgtgtggataggctgggacattggagggttctctgcagttgggggcattgcagtatttcccgagcaaaaggtccattttgggcgtggtcccagtgctgatgtggtgatttgagttgcgatggggtctgagtaggattaggagctgtggactgaagtgcagttggggctttgtgacatactcatgaaaatactaggctcgaagaattccctcacgggaggagcgtcttgttggatatttcccaggttgtagttaaatgggatgtcctctttcttggactggaggtagtaggcatcttcgaccatctttttgttcagtcggttgaggcagtcgtgggggatcacattttcaacaacgacaagtccatcccggtgcaggctgcgcattgcaatctctagattctggtgtgaaagacgcccattcttgatttcatcttgtgatggacgaatggatttcggataacttgtgatcttcccgagttgggtcgctagagatcggatctgatagtgacggctcaacactgttggagccttgaagaggatttggctcatggtgatgaagtgatatgtactaggagaggggaatgtgaagacaatttcaagagatcatgaattatttatacatgtcaagtcagtttaacgagataaacattgcggagacggcctataaagatgtttgccccgctagtcttttcgcctttcctcgcctttcggtggtgccactttcgctcgtatgtatgcggagagtccgacttgccgagggtaaatcgattatattagcttttaaccatagccgtttcccctactttgccaatcgcaaaaccagttaaatagcctctcaaaatatcgcttcgctaaacggctcgcatttggtggattcgttcgcctttcgtcccattaggcgaaagcgcaggttcccttcaaccccgcacgcagcctgtttctatgactcctaactataaattgtagtaatttcctcttaaagtccagaaaatgacttctcaaccgaagctcctcccgcaattgacctccgccaagctcttcctcaccgaagctggactcgaaaccaccctgatctacaaaaagaacatccacctccccagcttctccgctctccccctcctcaatacagaagaaggcacagaaaccctcctcgccatctacaaagactatataaatatcgcgctcacgcactcaaccggcatcgtcctcgaaacacgaacatggcgcggctctccggcatggtcttccaaactcgacctttccgtcccgcagatcctcaatctgaaccgcgcggcagtgaaaatcctccgtgatctcagacccaagattgagacgccatctactccgatcgttatcagcgggacgctggggactctccgggatgcgtaccaggattccacggatacggtttctttctctcaggcgcaggagaattaccgcgcccaggttcgcattttcgctgaggaaggtgtagacatggtgtcgattatgactgcgacgaatctcaatgaggctactgcggcagttagtgtggcgcgtgagtataacctccctattctcgtctcgtttagtattgagattgatggacggctgcggggagggaggacgcttaaagatgcggtgcaggaagtcgatcgtcgcacggggaactacacgacgtatttcggtgtgaattgtgcacatccgcgtcatatcaggacggcattgcgagatgttcctgaggatgtgaggtcgaggattggggccattcgagggaatgcgagtcttaagagtcatgatgagcttgataactcgctagtgctggatcggggcgatgtttcggtgtgggctgaagagttcaatgggcttttggatatgttgcccgaactgaaagtcgttgggggttgttgtggcacggatgaagagcatattgagactcttgcgagagaaatttacaggtaattcctggttttaccgaatatttacatagctggatgtatagtattagatttatgaatagaattgcaaagaggagaattaaattcgtattccagctcacagcggaagaccatagatatcataataataataaagatcattcagcatacacaacatcattcaagagccacgctcaaagcagatctttgaagtatccacaaacaccaaaaagaaaatcgtaaaaagaacatcaaaatcaggcctcagccttggtctcgacactctcgtggtgcgtagcaatctcagccttcttctcattggcatcgatctcgagctgctcagtgaagttgacggaaggaacccagccaacagacttccaagcacgaggaatcttagcataaagctcatcgacctgctcaagcgaaagacccttagtctcgtagatgcaggtgtacacaaacacagcacagacgaagcagaatccaccccagatgaagaacaccttggactgaagattggcgtttccaggcccgctgttgaccatgtatggcgtggcgtaggcaatagcccagttgagcagccagttggtggcggtggtgatggagagacacttggcacgcgccttgagggggaagagttcaccagtcacgacccacgcaaccgggccccaggaacaggcgaagaagaagatgtagacacacacgaaggcgatgaggactttgttcgagatgtcggagtcggtggctgtgccgacgatcgcgacgatgagttgcgagacgcacattcccacggcaccgaacatgagaagagggcggcgaccccatttctcgaccatatagagaccggggaaggtggagatgacgttgatgatgttggtgatcagggtgatgacgaaggagttttggatgccggagttttggaagaaggtggtaccgtagtagactgtttttggttagtgctggaaaaggtggaatgggtgagaagggaacatacagatgaagttgacaccagtgagctgctgcagaccctgtatggcacagccggttgcgagacgcttgccgatggatccacgaaggatctcgaggtaggtagcacttccgagacgcaattcgtattcgtggtttgcctggatctcggcgagctcagcgacaatggcgggatcattcacgtccatgcggcggagacgaccgagggacttgctggcttcctcgtagcggtcttgcttgatcaggaagcgaggggtttcggggaggatcagcatgccgacgacgaggatgatagcccaggcgaactgcacggcgacggggatgcggtagcagccggtatcatcacggtccttggtggagttgttgacgatggcagcgagaaggagaccaactgtgatggcgagttggtaggtgccgacaattgttccacggatccatttgggtgcggtctcggactggtagagggggattgttgcggagaggagaccgacgccaaaaccggcgaagaagcggccagctacgaagagggggatggaggttgctgcggtttggaggacaactccgaaacagaagacgaagctctccatcaccatacccattcgacgaccaaatctatcagcgacaggggcggcgcctagggcaccgaagaaagtgcctgccgagaggagagagacaatcattgatgattgtgcggcggtaacatcagggaggtgatccgtttcgttgatgaagccagtcgagaacatctctcgccatttcttcatggcgaggataccgctgatggtaccggtgtcatagctagatggtgttagacctgtcttcgagaagtatagaacttgagtggtacatacccaaagagaacaccaccgaatgcaacaaacagtccaatgatgatagccggggcagcagagcccacggcctcagtcggcctcttcaaagcgaagcccattgcgagtgtgatcacgaagaatcaagtcaacccaagtaggtatgtgtcgtgtgagtatatagatgaacccgaaagtatagatgactcagagaagactgatataggagagaaaggaggaagcaaggtacacaaacaaaagaagaaacccggaggtcaatccccctctatttgtacttccccagtctctcaaccacatggccccatgcttctcaagccggggaaattttcaaccaaacctgaaagcagcgcgggggaccgaacttgccttggaaggcgaaaatccgagtcctgtccaatcccagaacagcattccccccattgtcacggacttctcgatgttttgggcctggggatagagtttagaccgaaactggagaagctaacgtggttaggggctcaggccccggacttcaaccgggatggtcattggttcgacgcaaattggctcgtccccgaaccgagtttgatttttcttccctgagccttggcgtgcagttgttgtgctttgtgcagtaggatcggcgaaactacacggagatatagaagtacatggaatcagtatagtcttgctgtacatatctactgcatatggtgctctattgttactgtttgttgtatatcctattatgtatttgcgtggcaacttagggctgacatgtcttaggaatatccgtaaatagcctttccataccacacgacaggccgaaaacagcgggggggccgggttaagccaatgccgatcggtatcggcgtgtctcccgcatcgggggagaggccatgtttatttgtcacattttgctgcaattcctatgtcattttaatttagacatagttctggagcgtgttaaattagattgcaaatgtaatatgtagaaggtcagagatttcaattttcaaagcggatatttttcccccgtcttttcccctcatccccagacatcagtttccccagacctcccccagaccttgtatggagcaggggcccgaggtattgacgcccaataagctaagagttggcagttacgaagctgttcaccggagccagaatgggaagggggcaaagcatggccagattaatttcccccagagcatgaccttcgcgaggatctgcagaagccagaactcgccaaaattgccggggaaattttgaacaaatgcccagctggcttagtcccgcgccagtgcgccattttcccaagacgcggattggacagaggacccgaggctctcccgacgttacactcccggagaatcatcggagacacctgtggcctactactagctagatcggtattggactcggggataactttgccggtcaatgccaatgccggtggtttttagcgaggagtggcgcaggtcgggagctaaagtagcgttagctctaggccgttcgggttttgcctaggtcaatgctaaaaactgatcacatgttcgaaattagactaccgagtatgccaattcggcaggttccgatgaaatgcttgtctattattttgatgctcgctgaagaagaagaaaaaaaaaactggccagactagctaccagcgccagatcaggatgaaatacacagtcatcaccacttgcgccacaaatttgagggaatggtatagatcccggacgatgagagagacagttgagtgggaacgggtagccgaggcggggcgccatgcagccttgtcctttgaggcggctccgaagtccccgtctataccccgatatgcatcttctggggatttagtgccggggtagcgggtggaggctgtcatgccattgcggctggctaaaccacccgccgatgagagtgtagagctagatgcaccggaggtgtggtgatgtgggagagagcgcggttcggaaagggggagaatcgcaccggaagggcatggttctggggtgtagaggacgcggtagatggaacggaggaggaggatggagacactgatacacaggataatgaggtagtagatgaagattcccagctggtctgggaggatacagaggtggttttgcacagtgggtggtgatccgtcttggatggatttgcctgtcttggggtcgattggattccacagactggtaagcacgaaccccgggtggcggactcccatcgcccaggaaatgcttttgacggtgatttcattgggcgagccgttgaattcccgatgggacacttcacagtagtcatggtcgtcgccggaatacacctggacgacattgggtcctgccttggaaaccaattcggtggaaatggtctgcgtgaggacattctggtactgatagcctccggcaattctcaaagagttaggctcgtcctctgtcagttcctcgtccgatgaagacggcgggtagtgttctcggagaggaccacagggagtggctggttcgcggtagagcgggacgtgtgtcagaataatagtaggaaagccgacgcctgctggctgaggcttttggtggatggcgggctcgacagcgtcggcaatacgataatcgaagatagtatgctcctcggtcttgttctgcagcattcgcagctcgtccgtctccgccttggctttgtggatagccatcttatccaggaagtcatctgcatctttccagatcgggcggagagaatggttctcgctggctgttggagagctgcccgtcaatggatcgggctggtccatcgcgctcagcgagggactgtccacggacacgaaagtatgattcccaataacatcgacgcggttggggtttccaaaaaaggactcgaagcgatcacggacgggttcctggataccgttaccgaacccaagatcatggttgccaggtagactagcaatcattctgcgccctcgtccatcgacagggggcttcgcaaatttctcccacgggtccacaaaaattttaataaatcgcccaaactctttcttccaaaaggagtccgtatacttcttccaccgcggttcggggctgctagttgtagccgtggcccattctctgccgccgtcgaaaaggtcgccaagaaacagcactgagtccggctcgaggtgatcttgtatcaaggaaaatgaccgtcgcatatattggtcggtgtatttgaccgtcaacgtggacacaggccatggtcgaccggggtaagtgtggggatcaacgagctgggggtcggcgatgaaggcaatgtggtgaggtgtggcaccttgaggctagacattgatgttagtaccagccagggaactgaattgcgataggtattccgtcaacttacccattcttcccaactgtcccaaaggcatttgttgatgctgtcctcaaataccgtgcgttcgccccaccgaatcgagaacatccacagtaaaataatgacattggaaatcgtaaatatacgtttgacaaggttgatagcagtcggcttaattccctcacttcgaatactgccaattctccggctgacactctccgtaagccattgtcttgctgtcgagggaatgcagtcccacacgcgactgaggatattttgcgatctcgacgactgatgttggttgtaggacggaagggaggaagcgcccgtgctgcgtgggtaggcgaatttcatgtttggcttagcttgacagcaagactaagttaggatagggtggctcgaccccagacgagacggggctgatcttcaaacaaaggaatgactggtcatgctctgggcatacaactgaaaagaaccaaaagaatgaaggatgaaggatcaaaatagtaaaatttcataacatggtgttcaacttgaagacagggggattaactggcaattgttttaagcttcgggtcaatgtgtcgatcgccagacatggggcggtcacgtgtggacccttaacaaacagattgtctacaacatacggggtacaatataatttcggcacatttccaaggctgatttgcaggtcttgaattagagataagtagaagtacataacaaatgcagtccgaaggatacagcgggtcagcgggtctatgtccgcacattggatgatattgcacggcatgttttgccatgcatttcccaaaagactgtgtagctcaagggaactaccacttccaagtaaaaccagacaatgaaatgggaaaggagtaggacaggtctctagattctgcccgaacgaggtgcagataaagatagggtatctgggtaaaaaaaaaaccgtaggggtgagatgtttagggtaccaaatgagaaacgaaagtgcgtggaaagtcaccacatgggattaagttcactttttagggcaacactggcctccttcggcacagttgttgtcacactccagaaggcatgcttgagggtcgccctcccgaacactagcagcacgactgggaatgtggtcctcggtgtgagaggatgatccttgtccattgtcttcgacatcactttccggcgcgaactcaggttggatagtcgaagagtgaataccgtaagcatggagacagcgtctgacctgtctcgccagacgcatgtacctctccgagccttcacccttgatctcggtgtccacttggagatgaatcgaagccacgaccttggtgtcgctgagttgccaaacgtgcaggtggtgtgatccaatgacaccaggaaggcgctcaatgtcttctttgatgtgatcaatgctcatgccggggggcacggcttgaagaaggatacgcgaggcggccttacacaacggaatggcagatgcaagaatgatcactgtgataatgagagaaatgaccgggtcggcgtaaaagcgccacttgtagtccgtcaaccagatgataagcgcggaaacgatcacaccgatgtttccgagggcgtctcccataacatggaggaagacaccacgcatgttgaggtcgtggttgtgacccttcttttggccctttggcttaggctgggcatggttgtgggatttgtggacatcttcatcggggtgatggtggatcttggtaggagctccttcctcgtcggtgtagttggttgtgcgatcgcggtgactcaaaagacctgaacgctcagatggctgctcatcctcgtcatttccattgtccgaatccgacgattgttcattccggtattgactagccgcgataatcccttgtctcagtctctcggggagcacgggaatatcatcggcgctcacgaatccacgtcctgtcgaagtgctgtagctccttggcccgcgggtctggaggtcgcgccgttttcgggatgggtcagtgggagattgggtaagggcattttgaggcaagcttgcggctctgtccaaaaccttaggcgccgccaagctctcactgtgttcggcgatgggtgtgtgatcgtgatcatgatcaccagcctcgatgtcatggtcatggtcgtgctcatcgtgctcgccaccgttgccgtgatcgtggccgccaggtccgtgggagtggtcgtggaacagtgccaatccaacaatattggaggctagaccgaagcagccaacaatgcaaacaaagcgcgggttttgcacttcctggggctcgaacaatcgctgggtcgcctctaagaaaatcgacatgcacagggcgactaggaacacgccattgaccaaggcaccaagtgtctccgctcgttgccactgtatagagaaaccaattgtcagatcgtcatcgtcttcgggctagtattgacatcaacttacgccataggtgtaggtgttggagctcgtctcccggttcgcaaccttcacggcccataatccgacacatagggataagacatcattcaactattcgggttagattcagccaaagagcaagattgtagatggtggcgtaccatgtggaaggagtcggcgacaagggcaagagagtgcacggcataacctaggaaaacacagtcagaagccggtcgcatacggtcaaattgccaaaaactaaccagtgatcaattcaagcaagaaaaatgccgtatcaatgaccagcaggatcaagatcctgttcgttttggacaggcccatggtagcgtgaggtttgtggagcgctcaatcagagctccacgggataaaaagtgtaggtttataactgcagggcacagtgaatatttaaataaaaggaaaggaaagagggaacgacagagaattatagagaggaggggttgacgcgatgaaaaatacgtaaaagcgccggggatgaatcgaggccgtaaacggccagggcggaaacacctccggcctccggtctggtccgtggtggcgagactctttcaactttgcacttttattagtcggtcaatttcgcatcaacatgtctcagaagaagcgatgctttgattgagagtctttcgcttatttcgcatattcacagcttgaccccaaagagccccggggtccacctcccgtttacctgatcggcgggggactctctcattggaccggagcctcattattttcattgttgtggcttcccatctaatcctgagtcaagctcttctatcctctacctggtgactagctacatgtatacaccgttgccttacagacagtggatctatgtcctttgagctctgtgaacggacccattggaatagctgcattaggatatcggtatggtagcaccacactggaagttataaaagcaactggctcatgtgggactgatcactgcagctgcattgcacacgttatgggtatgctttgattcctcttctttcagcctatttacggagtatacggctaggtacgcagttcctaatgtacttatctgtactccttactcactgctaagcttttaggaaactctcacatcgggagctcgcataatttcaaagccctaactcatggtttccactattgcctagaactttcagcgctcttctatcggtggacacgtccggtacagcgtttgtttttttctttttttttgcaatatgaaacttagattagtgggggcccatgaagcagattttcaagactacgtagtacatattcacacgtcaggtataatttttaagtggcaggatagactgtgtttggttcacgctatatctacagacttatcatgctaggagatagtatcacaggagcaaaggagcagtagagtagaagcacaaatgtatactgacatgtgatggcgcttatcttcctagtgtttattacctctgtcgccaaactagtcatagaagctactcgacgctattagcaaactatgtggaaaccagcttcattacatgaattagaacgccaatcataacagtattctatatagaaaatcaaactacttgtaagttgctcctgctctgtactttgtactcagtacacattccactttcaatacgacgctggtccatctgtgtagcttgtctaggagaaagctccgcgccaattggtgcactatgttaggccaatgggattgtaaagcaataataaatggcatcgggtggtttgtatattgggttagtccgtaacggatacttaatctgcgggatgataggatatataatcgctgctagttattgtcacgtcagagcatatgtataaaatggtgaaattgatgtcagctagggaaaaataaacagcctatatttatgctagagtagttttgtatattcaaaagtaaagatagtccaattgcaacaataaatgttcctaatgagccctaatgagattgaatgtcaacattgaaagtgggtctgtcggtcctatctagctatccgcgatcgagcctactcggcataagtcccacaacagtaggccggctggcccaatggcaaggcgcttgacttcgaatcaagagattgcaggttcgacccctgcgtcggtcacttcttttttgtctttttggccctgagtggtggatggttgtgtatagtttttgtggaggcggtgatataagcggtaaggatatagcgataagagacaaaggaccgataactaggcattatacgcaggtcaaatgatatcaaaatgtactctgcactacatatatcaatgggaaaggagctgttctctaaggaccattataatggatattttatcagctcaagcggcaagtaagcctgcgatagtggagtatgatttttagttcgacgataaaccaggagaagttaggcagttaatttacatgagccacatgaatagagctagctatgcaagctgtagatcggagtgggaataaagttcttggtccctgacattgacaccatatgcaggttttagatggtgatcggcattcaaagccctacgcatggctggggcagtgcttacaattggaccattctcgacgctatttaaagacttcattgcgagaatacgaaacatatgacagaaatgtttttttatttacaatacaaccagatctatctaataacacacaaactctcacttatctaaaacttaataagcttcttgcgaagtgacgcaattctgttggttgcattagagaatgcacgcttgtccaacgaaccatccttcaaagcagcagccagagcatcgtaaatagcctctccctgagtgacattcctcccactggcaagcaagagatccataccagcctgagcagccaacaatccacggggaccctggtcgccaaatgccaccagcgatcccgcctcaatagcatcggtgatagtgacacccttgaagccaagtctaccgcgcagctcattctggataatggccttgctcagtccggaggggtaattggcgtccaaagcagggtagatagcccacgaggccatgaccatgtcgacaccggccgcgatcgccttcgtatacggggccatatccaccgagcggagctcctccttggtgaagtcaatggtgacgggctccacatcggtattctcggtcgtgcttgctccacccaggccggggaagtgcttgacggttgcgacaacaccgtcaccctgctgggcgtggatgaatgcagatccgcatgtcccaacgacgctggatgagttgctgaaggagcgctggtagttatcggcgaagtccccggccacgcggaacacatccaggacgggggccaggttggcgttgttatggaattccttgagggtggtcgcggcatcaatgcccatctgcgtcgcggccgctttgtaatcggcggcttcaccgactactttggcactcgacactggcccgccggacaaccgacgcacctctccgccttcctggtccgtcatgacgagcaaaggactgccggaatagtacgggctttgtttgtaggtctgctggagattgtcaattgtggtggtgaggttatcgctgacattctcgccgaagaggatgataccgccgactttgccttccttgatcagctcgaggagctgggcggagggctcaaggccggggtaagagtagatgacatgggatccaatttgcgcttggagatccgtcggggaagcagccaaagctgaaggcgcaagggcaaggaagaaaggaagaagagattgtgtgaacttcattttgattgtaggctggttaaactgtcaaaccgggtatcccttcattgtctatatatcatgtctcgctgtttatgaacacattgggaactccgattttgtcctatgattgccatgatagtccgaactgtccctgaatctgttgggaaattgcgaggggtgttacattgattagattgatcagcgtggactattaccacaaggggaaaccccgcatatgaaggttactatctgggagccgagatggccacgttttggcgttttggcatgattgcaacggtcctcggcacctaaggaatttatattgctttttatgtaacctggttcatcaaagatagttttgggactaggagagatatatttattggggaaaggaggccaaactgcaatcctaaccgagggttcgttgcctgaggtatccactctaacggataggcgtgataaggttccctagtttgcgattttgtgaagaacatgctgcgtacctgattgtaaccatagattgaattatggagtaagtcaaattaatctctcggccgaaattgaaaacaatggaatttgtcataggtggtgggcagtagcatttaagtagcgactatttccatctcaaagcacaattctcaaatgcggtttctttacggttttgaataagagttccctaggcgtgccaagaatctaactgcacgtgggaaatcttatttccataaataagcacttttcccctgggggcttcgaaggttatcaaggactggtacgggtacgaatagccgccatacatctcggaattaggtatatggcacttgccactgactaaatatgtttgatacccacgatcactaccgaatttgagataagcgaaggacataaaacaatattcgggatacatatcacaatagcaagcgccttgaggtccccatcactgacaaccgggcccaagttgtcttggaagaaagttatattaatttaatgttttgtaagtaggtttcagcagatcgaagtcaatattggatgcttggattggtttgacagaggatgaaagatattcactgttgatggagttggatggaacagtcgagtgagtggggtccaaggtggactgacgaggactgtgattgaaagtgcctattgacctgacagaaggaggggcaagaagactcaagtcctgagagtgtccttgtacaatggaatccaagaagcgacccaatttcgtaacctaacagacaaaactagaccacagtgtatcctttatcaagaatatgatcagccccgataacagaatagtgacctaaatagccctgacgtgtggacataacgaaggaacccccaaaactctatcgttcttaccccagatagccgagccgcatactccatcgccgatctcgcaggcatagtccgtcagtgaccaagatagagccaatggcaacgaatccagacctgtttaggctcatgcagatcgtccgagggtagtcgtgaccctgacatagagccatagtatgaactgttaaggaccagtcttcgcctatcctgtctcgcccgcccgaataaagtcaccgagtgtgtggtcaaccatgtactgcgtatcgtcaataacagccggagtaacttgctttagatgctgagccgatcggatgggtctctccatttctgactcaaagaggtaaaagcagttgcatcctgtgatcaacttgggaactgccggcagaacttcgacattttctggttctgtttccaacacgatgataaaatctccccaggattagacttccgtgataggtgtcaagtcgaaaatcaaacccactgctggttcatcgtcccaaatgttaatttctatcaattcgtgaacgactgaagtggtatatagggatcataggctctgtcgtggggatcgtccgtcaagtagcagggtacatgtgcactttgtcgagaccatggcttcggcggcagtttatgaaaacgataaattaatactcgcttgttgcactcaattgcccgtgcttttggaaatagttcgagaagaatttggtagctgcaggttcaaagaatttcttgggatattcccgaagatcaaacgtcgccattaccatctgccgagcgggtcgggtcgtaagggaagttggatttcgaaaccatcttgtgggggacttgtgtcaggaaggcctctctcgccttgggaggggtgatccttggactgtggctgccctgcataattgagggtggatctcccgcccattgctcctggttagtgaggtgggggaaggtgatcaagtccttcggtggattctggtgatggtatcatctttcatctcttgtttagaagctatggggtagctaactagttcagctgaccacatggtgatcacataactaccggatggtgacattaaatcacgtgcttcttctttatcttagactcggaacattattcacactgcatatgatatatcactttcggaactacagtgtacatatagtgcagaatcagttttttccatggcgtgaaacaaaaacgtggtacgtagctcggagcaacattggaggccacatggcagctgccgggtaatatctcaatggctcagtttctttgaaattctaggatctttggctgctagctactattctctaaacccagttggattatatgtcgtaatgaaccaattctacacgaagctcaagctgtaaggcccctgagatgctcaacgtggccgattatcagccccactcaccacttcccaaagaggaagctcaaagtagaagtcttggcgcggagattaagcactctaaccgacaaatcatcttgcttccctcgtgctaaaaattctagtggtattctagaaatgggtaacattgatcagatatgttgtacgcgattctgccaagcagctgaacccttaccacaactatcaaaattccaagtaccaaagtgcctaaagaggtatttctgtagtaatagtctccaaagaggggttctcgtatagctatagcgcgaggaacctttataggctgttcgaagacccttcgtgctatagcactacgataacgtcaattttagaagttgaattaggactatattaacaatttttaccggatatcgaggtaagaaacaaagattggccgttatgcaaataaccccctaacgaatggtagaattaccactaagaatttccattacggcgttgtaccccacaccccaatgacctcgggttgggttgcttggcaagagtcgcgtagactatttactgggtctattagtctgcacggagtacctggagggcgtcattgcttaaaaatttcaccacttggagacttggagggcgtcattgcttagaaatggccattgattcaccacctgggcatgggctataaagactttgcaacaccacgcatacaatgctgcactgccttataattcaacaccaagaaaagacatccgcatctgataaagaatcatgggcgcgccagaactttctagcccgactgatgaggctatacagcatgatccggagcaggccaggataaatcaagagaacgtcgatttggaaagattgggaagagagcgcccaaaatgctttggtggcgcttggtccgaaatctctttttgtctctcgatttttatgtcccaaattcttgcagtcagtcacgacgatgctcctggacaatgaggaaaaattctgacatttaccaggaatactacatctcaggctcaaatgtcctccttccaacgctcgtcagagagctggatctccctaaagcttcggcggtatggccgtctaccgcactgtcgctggtcgtgacctcgacgctccttatatttggcagactaaccgacatgttcggcggatatatcatctacagcgggggagctatctggctcacgatatcctctatcctatgtggtgtctcccaaacatggctgatgttgattatctgtcgagcgttgcagggctttgctctggccgcctttcttccatcgggaatgatgatcctcggcagcacgtacagacctggacccagaaaaaacatcgtttttagtatctatggcgcatgtgcggcgctgggcttctttgtggggattttcttctccggactcactggtgaatatctcacgtggagatggtacttcttcttcggagcaattctctccgccatcacatcagctctgtcactcttctccattccgcgcgattattccgagatgaggaaattgggcatccagatggattgggctggtgcgtgtctttccatcccggcggctgtgttcattgtttttgccattgcggacagttcatatgcgccgcaagggtggagaacgccatatatccctctgttcctcgctcttggacttattttcctcggaatgatggtctatgtggagggatgggtggtgaagaaccctttgctccccggtgatatttttcgagttaagtatatgctgcctctggtcgtcgctctgctatttctttatggcacattgggaatattcctactctatgccgttctgtagtaagttatatcctaatatcgttcagactgggcttttctgacaacagctatagcatgtctgatataatgggtgcttcgccaatgcaaatcgtggcatgggctgcgcctatgggaattggtggcctcatcctctcagttggaggaggaatgatcttccacaaagtcccaggaacgatattgatgctgatatcatgtctcggctacgtgggttctggattgttttttgccgttattcctcttggcggaaattactgggctttcgttttcccgtcgatgatatgcggcacagtcggcattgatatcagcttcaacatcgccaatgtatttatcacgacaaaccttccaaaatcaaggcaaggcttagctggtgcattgatcaactgcactctgcacatggggatcgctgtgctgcttggtttcgctgacattgttcagacccagacgtctgacctgggttctcggcgcagctacaaggctgtcttttggtatcaaaccggactagcgatactgggtcttcttatcgtcgcctttttcgtgcgaattcgagaggctaagagtgagtttacgcttgatgaaagagaagcaatggcagcagagggaaatgaaagagctggcgaggtcggggatgtttgataccctatgcatttgtattttttaaaaataatattagccctctatagaacaagacaagaccctcgtctgtgaaaatttcaaaacttcaatatcgagcacagtcgacatcgccattctatttatatagcagtgtatgggatctccgattggttaaccgaactacaatcacatgttcctgaaagctcacgtgacataactctgtagccttggcgtgcatggtgcatggccctggcagcaatccgtggtgacacttgatgatctttgagacctctagtctccgtgctctactcgccattcccggagcctagaaatatagatcacaatgcgcccttttgattccggatgacgagtgagattcatgacaatgtcagtcacaacaattccacttgaacctttcatatcgaccgcacgtgcggaaacgagtcacgccgacgcagtcatgcgagacctccaatccgaccgaataaaaccggagaagaaagagaacgtgggattgatggtcggcaatagtatagctgcgtcggccatggatttcactgggacatcatcgtttagggaaaaaaaacgttcgtccggccttaatttcctgactgcagaacacccgcttttcccacccatgccctcgtatgggccaccatccgcattgcgcagggtccaatactatgcgttcatcgttgcttcattctttctgtcgatatgcttcttgacggtcatattcatcggggccctgatccacacagccggagtcgcaatttcggaagctcgtctgcgattgagcggccataacccggagaccatgaggtcgttctatacagaggaacaggcgcgcaggaaggcacgggcaaacgtcgataggagatgggctctgcgccaacagaagagggacatggacgaggaacagggacccgaagaatgccaagaatgcccgtcgttggaaggaggcaaggaccctctggttggcgatgtcgcatactatgcccgccgagttggtcttgatgtggagacatttcgtgtgcagacagaggatggtttcatcatcactctgtggcatgtgtacaatccccgggagtatgaggcattatcaccagaagagcggcgtgagcgtggtcccgatgttttcaccaagccaagattgtcgagcacatctcgtccacaatctaaccgtcggtatcctgttctcctgatacatggattgctgcagaacgctggcgcattctgtaccaatgacgaggatagtctggcattttacctctgcaagtccgggtacgatgtttggttagggaataaccgctgtggatcgcacccagagcacaccactttgtcgaccgacgacccgcgtatgtggtcatgggacattcggcatctcgggacactggatctcgcagcactcacgtcgcgtgtgctctacgagactgggttcgagaagctaggtctagtgtgccactcccaaggaaccacgcagaccttcgttgctctagccaaggagcatcgtcctgagctgggtgaatacatctcggttttctgcgcgcttgcacccgctgcatatgcaggcccgcttgtaagcagaccgtatttccgattcatgagtcttctctctccggcgatgttccgaattgtcttcggaattcactctttcattccttccatgatgaccgctcggcgcctgctcccgcctaggatatatggaaccctagcatactgggtgttctcctttttgtttgactggtcagacacgcgctgggagcgtgatcttcgccatcgaatgttccaattcgctcctgtgtatgttagcgccgagatgatgcgctggtggctgggaagcgacagctttgcgaaacataaatgcattttgtccacagataacgaactccttcaggagccaaacgtgaacccgcatacgcgagatgctgtttctgagcatggtgatgatcccagagacgcatgtttgggcccggcctcaagcccctggtatggcccgaggacacccccgtttgctttctggatcggaggctctgatgctcttgttgatggtcgccggcttctgaatcgctttcaaagtggctgcgagcctcatgtgagtctcgttcattcaaagatcattgaagaatatgaacatctcgatgtcctttgggcgatggatgcgatcgatcaggttggcagggaggtcaacaaggtcatttggacaaccatgcctgatgacgcacgtcagatatgtcgcactccgcgtggtttaaccctagacatggtagacagaggttagcttatatttgtttaggcattcatatattctacttcataaagagggctttcagctcaacaacacttcttgtttattcctatgggacactattactgggaaaacatattttacagagaaggactttcttagtatgaatgcgaatatgaagaatgcgcttattgcgttcatttattcctttttgaggcctgattcaacttggcagacccaggtcttcaggcaccgttcaaagatcacctcgatcgggtcgcaattcaagatatcaggcgcatcctggagagcacggcgcagattcgcccgcccgtattcagccatgttctcatagacctcccaccgagtcttatcacccaagacggcctccttcaacattggggtaagcggatgcagggggtcgtccgggcggcgagacagcgatttgacccaatcggtgtaggagaccccacgcagcggataccgcgaaatccgtttgaggatctcgaaactagtgttaatgtcgatcgcgtttgtcagatcgggctgaatgagattataggcatggccgaagttgttgtgcgaggtggaaatgtggagtatggcgttgacgatgaagtctacaggaatgaactccttgcgctggttaggcagaatagggaataatcccagagatatacagctagtgaacagacgagaaacaaaatcgtccgggttgcagaggcctgatttgctgtgaccgagaacgaagcccggccgatagatggacacagggaagccgttgtcgatggcactccaaacgatcatttcagccacatactgactctgggaatagccggtatcatactgcatagcggccaaatgtggtgccgggcgctcgtcctccggcaacatagtggccccagtcacatagcccgtcggcccgtacgcggcgatactggaggaatagtgcatggccttgagacgctgatgcttggcgaattctagcatgaacagtgtccctatgacgtttacctggcggtgacttgaatacggagccacgtaactgaccttggctcccaggtggaagacaacactcgcccaggatgcccagtggtcgtattgggtcgtgtcaagcccgagtttagcaagagagaaatcaccagggactgcaatgacctttcggaggtccagaaacagcccgtactttccccccgtctcctgaatacggcgcagggcagttgtctcgtcctgcgcccgcaccaggcacgcaacttgcacaacctctggccgcttcaccagagcgtctaacagaaatattccgatgaacccggtagctcccgtaaggaagacccggccctcatcggggctctgccaatggggtattgtagtgtcttgtggcctcaggaactggcccagctgggcatcttgcagccatatttcctgctcggactgggccgacagatcgtccccattcaattgcagccgcgtcaccagttggactaactgctcgaatgtcgagttctcatacaacatgcgagcctgcatcgaaaccccgagcgcttggttgatgcgggtgatcatcatgacagccacgatggaactgcctccaagggctacaaaatcggcggtgggtaccagatgctccgccggtaagctgcagacatctagccaaatgcgctccacctggacagctacatcatccgaatcaatctcgagggctgcggcaaaatcccgcgagcgctcaatctgctcgtaccactggcgctccagtgctctgcgatccgccttgccggtcgagctcaagggcaggtcgctgattagttggatgcgcggcaccatcagatgaggaaattggctgatgtaggctcggaggatcgctccttctgtggactcatgtgtggtaggaatgcagaaagccagcagaaactggcctctttcgacttcatccggggtgatcttgattactactgccgcactaaccagccgggtctctagtaggctcgcctcgagggcctcgagctcgacccgttggccgcggatcttgacttgattgtcttttcgaccgaggtagaagtgcactccattctcatcagtccgcataaggtctcctgtcctgtacacatggccaatacctcgagtggtctgactcttgagttgaggcattgtcacgaaggactgggcagtcttctcggggttgccaatgtagccacgagctacaccaggcccgcctaccagcagttcgcccacttctcccggctgagccaaatgtcccttctcattaactaggaaggtctccaagtttccgatcggcttaccgaccggaatttcgccacgcagagcttcgttctgactaataacatgccaaagagtgtagatgctgcattccgtgggaccgtagccgttaatgatgcgtcttggggccccgttatcgaagattaaccgtattatatcgcaattaatcgcctctccgccggtaagaagtgtatctagtgtggaaaaggcatccgaacaggcgaatgcagtgactgtgaggagagaagtggtgagctgtagcacattgagcttctcagtcttcacgaaggctcgcagagccatcgggtcaagcaccgtctctgccgggatgaccaccacggtggctccacggaggagagtggtccaaatctcgaccagagcgctgtcaaaatggacgctcgcgccatggccaacccgttgaccgtgacgaacgaaatcgctcgaatcaaagctgagattgatcagcccttccgccattgagtccacggccttgggcttgcctgtcgtgcccgaggtatgcagtatgtgagaagaagtccaagcactgcgaaagacgggatggaagctatccacagccatcagagggaccttgctatgatcgactagggtgtggcgaaaagttggcaatcggtgctggtgcgttgcattggtgaggaccagggccgatttcaggttctcgagcatgctggccaaatgactgtcgggaagtttctcatcgagaggaacacaaactcgaccggcatatatgacggcaacttgacccaggacgtgattgagcccccgagggatgataatgcctaccggcgatgtatctcctggattgcccgcctgaatctggattgccagtgcgagggccttttgatgtaactcggcataggagagccgatccgtggaatcctggatggcggttaccgctccatttttgcggatttgttgctgcaagagaccagccagacccataccctccgggctagtcctgccaccacaatgttggataggaaagactggcgtggtatattcggatacgctacttccatgagccagagctccgggtcgaataatgtcaatgcttttatcgtacatggtgataagtgtagctgtgaaaaaggatgtggtatgaagtagagatatttgttataggtatgtcctatgaggatatggacaatagcagtatattgatagctcctgtaatgctccatcatgcctctcctatttatacttgctcagaccactacttctggaatgtcgtgctttatttttatacggaactgtaattcctagagacgtatgaggcttttacttcggactgacagagtgacatctgtcttatccaattgaagctccgacaagaaccggattttatatccctattgcattctatacgcccgggccaggacttcgcatacgcgggctatgctttggactgttgtgctacctacacactgctgatctccccaaaccccatctgcatctccaaatatgacgtcgtaattttgcctcttgtctatatcaataatcaataatggctgtctcttctcgaccctgtgatgcgtagagggtggcgcttcgagaccaccagcacggatcctcagggatgatagacaagctccaataagtccaagcctatcatgctgaagcatcaacgtggctgagcatcccggagataaccctgggagggtccgcagcagtagcagtgacatgagttcgatcccagagtcgcacgaatcccaggggcaagtattatccacgaagtatgatcctaatcaggccgacctgatgactagacctagatctcaatatctctgtacatgcagacttggacatgcctcctggcacagtacgcttagtggaagaagccggcatccaggttccggccggaggaggtcccgacgaagaaaatgagaaatgcctgcacagatcccatttaggaagggctgatggtaaaactccgagttcggagtggttgtaagtttgggggtcccctcgcgaaacttcgagctcgaaacaatcaatgactttccttggccgatcacttgcatatgatccgggagatcatggccccggacgtctctaggattgcgcgatctgacatcttcatccagtagaatcacagattgcgagattttgatattggcttcctcccgtatactcactgtatttcttccgatcccaagcggcgactgatcgtctccctgggcgagggctgcgggatttccaaggctgtagacccgtgggaacaagtacttttgtaaaatccatgaccaatcaagaatttttggtccttgagctgatgtcccctgagccattttttccctttcggaacattttgcctgtgttcagctgcattgcattatggtaatggggcacgcatgacagatcaatatgacatcaaatatagttgcttcaggctcggttcgataagcattgaaaccaatattaaaggacgattgattgctaagcggtttgtatgaaaggttgagatactttcttaggggtgctgggatctgagaccttgtagagggcacaggaaatttgacgtactgggctcagtctctcgtttggttttttgttgagtcaagtttgtgaccgcccttacccttgccctaatacctattttggtcaggtacaggtacatgtcaggtgatgtatacttgcatgaggctttcctgttaccaaggatcgggcgatgaagtatccgttcttcaattgctatccttgcggatggcagcaaaagctatcaatctttctctactgacattgagaggtgagatcagcccagcgcaactgtcccgtcgaaagctgaaggacttcagtccaagtcaatctaagctcagccaggcccactaaccccgcaatcccccggatttgggtgggaccgggccaaatcctccggactccacaacattccacttccatcggattatcataacacatatatgcacatggcaataatgaaagcagatataaggctatagatactatattcccatttagtatcatatctatgttgcattccaggggaacccgcctatagcaggatgatcatctcacccgaacagccccctatttgtctgtgtgtcacaatatacacagctgtgagtagttgagggtacacaggtacttacattgccctggtatacatgtatccgtagtacttttggtcaagccgtgatgccaaacctgaccaatcccatatagtcaaggccaatcaagaccgcttcgacacaacagggctaatgtggtggagagggctaatgcggccccattatgatcgactgggacttcccactatcaattgctagagtgttttcagtattcctatgtgtcgagtctcttcaatattcacagatatgtaattcgaggtagatatcatgaccatgacatccacttaaaccacagggagacaaatgtatcctgaaacatttgacgactccaaggttatgtgacgcatcgcgaccattggcttgccaccgtacagggatgtcctagatgtcacttttcactcagtcctaagtcctgattgactcccaaccccgcattcagtcagatgatgacagtgtatataatctctttcatgtcgctcgcactgcttgtgtactttctcttcttctcaagaaactctcctctccatcacacttacagcaacaacttgacctttccatcaacactctatcctacacactacatccaagatgtcggcagccatgggtcctattatgcagcagctgcaggctctccctgcccgctcgaggcagggtctgaataacctacgccagcgtatcttccagcagggtatgtccttaccccttgtcttccgaccgtctcattaaccttactcctgatattcggatactaacactgttcaaaggagagagacaacccagagaagccaacctcctgcgcacctccctcaatgttcaccgtcccgtttggatcactgctggcggcggtctgtacaccagcatggcagcggtctatctcacgatgcgatatctgaagcgtgttgctaggtagatggaccagtccagttatctgcctgttcgagtcacttatactcgactgcatgattctacaactcccacacatgttttccactactcttcacatacataccccttttattcctcacccccatgtatctattgacaaccaccgtgtctgctcattagatggggggattcttcaggtcccaggttgggctattctttcttttattcggtcggccgttggtatcctcgtcacaggatggcaagatagacctggcatttctgtttcaagggctactttaccctaaatcaatactattacgatgaacatattataagtaaactaggcctgcctagccccagccacggagcgatatgcgcctttgaattatgagtgtgtaaatcgagcgaaatccatatatttttctagcaaggtacacacatcgaaagtcgctatatgaatacccaaaagtaaacctccccctaaaatccgaggttctgtgccagtacaagtaagcaagtcaaagtatgtcgcaaaacccgagaagtgacagatccactcggctgaagaatccccagcttttgagatgctccacttcaccatcaaaggaaccaggagtgcgctcggcccatcgcttccaccatacacgaatgagacctcaggcagacactttgtaaatagcctactggcctatcatacctcctctcttactcagagcatcctcacttcgctgggatgagctcattgcggatgggtgcatgcgttattttttgcctaggggcttggcgaccccgcgtttgtgtgaattgggtgggttgacagggcaaaatgagtgtatgctcatattttcaggtagagcggatggctatctgcaagtataaatccatttttgggaaggttatgtgataaagagcttcgcgaaaggattgtctggagcgttgtgtttctggtcttcttgaacttgatgttgtttcttccgttggaaaaagggtgagacacgattggatcacttattctctaagtaaaattagtcatccgagcactgggtctcatcaaatggctcctaatcgttcctagtccacgtagatgtgtatcacttgcttgatctgctaagagaacatgaacatgtcattctctgactctaagtgctctggggagaagcagccatgatttgaatcaaatatgtttcttttcatatgtctcaaagatcaagcatgtatatacacccccgccggagtcccgccggaattgccaagctttctttcaacctctagtgggaaccttaaatgtcggactaatgtactgtcttcctttatccaaaatgcaaactcaacattatgcacacctccttaagagctatgcggtatgtcttcgcggaggttctgctcaaagcactcgtcccctgcagtcctgtcttcaggtacgttcttcccggtccggtgtcgaatgaatttaaaatgtctccgcgcaggtgtaccgaggcaatatgatggaatttacggcgtcttctatcatatctatgctaacacaagcacatacgaccatagggtgtggaaaacagggcttcccgtccgctcagccgtacttaagccacacgccggtgagttagtagttgggtgggtgaccaccagcgaatcctcactgttgtatgtttttgtctttttgcttatcatctattgtaataatgggtagatgttggggttttactggattggctatgtatccattttggcaagtaaagttgcaggtggagggaaggttctttttgggtatacatcccagggatatcaggaaaaggaatcgatatgtgtaaattaaataattaaatgaaaatagaaaatagagggccttgagaaaataagattgaagggggttcctttcttatcagtctttccttgcaacggcagcggcaacaaccaatggggtggcctctagctggagcaactcgatcagctttctgtccatgtcatatctttcagagatcggtggcaatatatctttttgtgttgacgctgagttcggggagttagggtctgactgccgagaggatcccgaggatcggaaccacattccgggctcctccaattcggagattctagtggggatagccctaggctgcccgagaccgcggagttagggagaaatgctatactgtgcttccttgcgtcctatgacaagttggctcgagtttataaatgtagagaacgccaatgccgcagagtgacagattatggtaatgtatttgcaagtatgtgagaggtaggaaatccaattgttctgatgccattggtaacatagcaaaagagcacatcttcgtatgtaaatccgttcatgtaactaagtgaccttcatgattggtagctgagggtaaccgtacccgggaagaccaatcccccagtcgagcccctcggctttctaattgagagcattgaggatctctacaacagtacagcgatcacttactatctgtttaccagtgcggagatcatagtatcaatgtcgtcttctggggcaccaacagccaaaagacaaagggtgaatttggcctgtaggtcatgtcgacaaaggaagtcacgggtgagtattccgctaatcctacactcgctcaacttcttccgcatatattacattctacatgccaataaaaattgggatcaaatcatgaactaaccattttccccccgcaaagtgtagtggcgaccggccctgtatcttatgccaagagctaggtttcgagtgtgtttttcccgaaggtggtacaccaaacaacttgactgtcgggaaaaggtatctatctgtttgttgtattgttctttgcaaatttttttttatattcaatacattcccggtagtgtaaactccaaaagatcctaacaacgtctgcagctatatcttacagctcgaaacccgacttgaagtcatcgaaaagtccctccaacaattacaaaaaactcaaacacccagcatacaacctcctagagattgtcatatccccatgagcgacacgtgtgtgactgacaatttacaccctacacaaagactgcagtctgacgccgacacacttgaaccttccggtcagacttcggctgagtttggggatattgacaattcccaaaattcgatagatggaatgggcgcgatcaaattcacagatgaaaaagattgtgggttctttggtatgcgcctcgctacatcacaattcgagtgtgaaactgaaatcttcagggccttcgtctaatatctcttttttgcaatacatttcccaagcggtggcaacagtaaattctcagggcagatccatctttgctacatctccattagaacaaaggcgacggggcatagtgaatgtttctaagcctgtgttttgtcctgccggttctactgacttggaattaaccacctttattccaggacgagtggacatgtatgcattgccatcggaggaacgcacttgggatttgatccagcaatttttccagaaaacggggcagcttctgccattcatccacgaaagctcattctgtgagacatatcgtcagatgaagagagaaaattccaaaggagttcgcaggacctggctcggcttgctcaacatcatactcgctatctcaacgagtttgtcggcgaaggataatatcccggcggaaatccgcatacaacaatccgacatctactaccaaagggccaatagcctttgcgacagagaatctagacgcaatgcaagcctggagatgggtacgtggaaatcccaaaatcgcacgtttaacagccaacctggatgttctaacatttagtcataaagtgcaatacctgcttattctaggccagtatctccaaggaactcagaaatctgttcaagcatggacgacacatggtttggccatctctgttgcgtaccagctcgggttgcactcgccacatgcaaaccaaggattctcttctttggagtgtgagattcgcaaacgaacttggtttggttgtatacttcttgatcggtgagaaactactctatagtaatggtggatgtaaattaaccgcgagcttcttagttcccttagtatgacttttggacgtccttgcactattccggagtcatacgtcaaattgaaaatgccttctgctgacatgcagatactgacttcgaccatcgaggcgagaaattcctctcagttggacggtcttttcttcacagccgccatgtaggccacgtcaccctttctatcagtgttgtgtttactgatgttcgagaagacagttatacagcattatgttcagcgtcttggattcttgttatggccagaaccttgggtttgaggctcctttcaacgctgccgagtcaacctcgtgtctcctgaaatgccaacttcagttgaacagctggcgtcttcaattgctgccatcattaggattccaagtttgggacggtccgatggaagcggatgacgtggagaagatgggggaagactctatactgaaacaccgattcaacatcgttctctctatgcgctacaacaacctcaaaatactgcttcatcgtcgccgtctagaaagttttatggaaacctccccagctgctgaacctataacaagtcaggacatgaaactacttggccagatggatctcggcagtgttgaaagctgcatttagtccgccatatcgatcatttctacagtacatagaatcttgacctccaacgcctggcggcgcgagcttctgggcgcatggaactattccctctattacagtaagtcaccatcttgcctctgacttaggttgccctctttggcacaagtctcattctcacacggttttcatggggatttgtagcatttaatgcggcactggtcatttttgggtcacttattgtggctctcaaaaagcgcgaatatgatatgacaccatggaatgttgttggccattctcgaccttataccgatcgagcgattgatgcgctccgccgacttgattctggcaaccgcgttgtcggaagttgtgtggaatacctttcccatctttcgttggtccttagtgctctgggtaagttgaaactctgcatacctagctacgcactcactcttgccctgacaacctgacttatttttcttttttcttttttcttttttgattttacttctgttcagttggctacgtgttctgtttgcgttggagaatcataatgctgaccgattgcacctccatagaaatggacgattcggattccaacacctgctggaattcaaatttttctgctggattttcagccgatgttttcagctcgcaatatggagcgacgtcggcttccatggatttgggtgaatttatgacaggtcaggattgggggttcctcagtactctctttaaccagtcgcacaacgacactaccagtgcccctcaatagagaaattccatatgtatcagatttgtattatgtttattcctatgctggaagctgaattagccatggtagcaccccggaagtctatcctatatgcccctctggctcttcaccgaggcttttgcaactctctatagatcagatcattcaagtatgtacgtactactggccggtagcggtggcgaagtggtaagcaccccgaaggcaacatgcagaatgacgaattggtctaaggttctaatcccatgtgcgcggtgtgtgtatacccctggcgcttacttagcgagtacgtcgagctatacgggctagttgggcaggtgaccctcggggtcgtaatagttactgagggtcattatcgcttcgaaaacccattgagccagtcagaaagtttaaaggttccgagtaggtaactgaaaaattgccgcataaagattcggtggcattccaaatactttcaaaagtcctgagaaaaaccgtatccatcagcgggccgttcaaaagccgagagagacagcaagatcggttttcggattctgttccgacggggagatacggctggtctcatacgggagccaagaagctcaggtggatcagccactgtcaactttggcattaaccaacagaagttctataacacgataaaaaggcatctgattcgcaattcacaaggtctgtatcgacaattatcacgaagaaagctcgcatcatgtcgactctcagtccacctgccactaccatttcggatgctgttaccgtgtacgaccttattgtagttggctctggtttcgctgtaagcttgacaaataagcggatcgagacgacatggctaatgatgattctcgtgataatgttaggggtgtatgactgctctcaacttcctcgaagataccaagacccaaggaaaggcagcgaaactcgccttgatcgaggccggtaaagatggagaacgatgtggtgccagcaggtagaaccttccgagttctagtgataattgagacgtatgtgtgctgaccagattcattcagatggacaccggccttctttcggttggacaagagtgtgttgcaagataattgcaaattgaagtacaacttactaaagactgtgcagataacaggtttgatagcggcttcaaggatgagatgaaggtaagtggcaggccaatgacttttatattccttgcgactgactatagtctagctcgtcaggtaagcgttctagtcagcccgaagatcgcactttttaattgtggcagtaatggacttgccgatcaggcatactgcgagaaattggaagccgaagttcccactacagtgaagtttcttttggaccgtaaacagattcggaagctttcaatttactcggactgacactgacattataaggtagacggaatcatagtccaacatcaagatgagagaaatgtctacctcggatttaataccggtaagccctttgagaaatccaatttcaggctatgccaaatgctaatgaacttctagaccagaacttcgccaaaggagacgtacgcatcctaaaatgacttttataccagccaatatctaatcactacaaatagggtggcggatatgccataatcctcaagcttttcgagcacatactgtcgttccctcaggtggacattatgtgggagacaaatgcggaggaacttctgactcatggcgatggtaccattcgtggtgtcaaggttcgaaagaacgacggccgctttgacaatgtgtttggtgagcaagtcatgctatcatgtggtggcttcgagggtaatcgcgaaatgtgagtgtgatcaggacttattcgatatgatatgaatctaaaaagtatggaaggctgggccgatacgtcggacctagagctgaccaacttgggttggtagcccctggtctcaagtataatacggggtttgggctcaagatgggcttacaagtcggtgccgcaacggccggctctttccatggcctgcacgtaagttacgcaaatgaagatcttatgagattcactaacccgtcgcagtgtgaacttgttgatactcgctcctcaaagccagaggcaactgtctggggccatagcttcggtatcgtcgtcaacgagtatgctctaatcatttaaatgaaatgagggataaaggctcacattaccttctttagacactccaagcgattttacgatgaagggaatcgatcgtatgttcggcctccagcttgtactagtatcaaactgacaaatgcagcctcttcgctacttgcgaagttattgcttatgagacatggcgcggtaagtaatgaggtaggtcgaaggcgaacatgcaccgctaacgtgtatctcagaccaaaaccaaaaagcatatttgtgagtcagacaaacctatattataaacggtatatggctaaaacgcctccaagtgttaccgatgctcccattatggaccgattccgacctggttgggtttatgatacaactgatctggacccagagaaaggcgagacgatcgaagatctcgccaaaaaactcggtctcgttccccaagaactgaagaagacggtggatgaatataatgcttcgtaagtcagctagcaggaatgtcagagtctcacactaatggctggtggcagaattaatgacaaagaattcaaccctttggtttttgacggcaagagcaccttcggcctaactcctaacaagaccaactgggccgcaccgatcaaagtggctcctttctatgggtaatgctcccctcaaatcatataatctgcttagataccactgttactgatgggtatctaggtatcctctgactgcaaaggttgtattcacttttggaggactgaaggtcgatcttgagtcccgtgtgctctccacgacgggtaccccaattccaggtatgatttctaatatttccttatcacagcaaaatccatcagaccttcgcacaaacacgctaaacttacatcttgcgatcatttcctcactgacacgtcacgtcgtattaaggactttactgcgctggtgaacttagcgggttttattacaacgaggtaagcccaacctaatgatccgttattgaagcaaaataattctgacaaaccaacagagtaaggttgcctccgaaattggaatccgaagtcaatcgccaacgatgtgttctttctatgtactgactatgcaccttagatccaccatgcaacagtgcgctccgatgtcttacattcggtcgacttgcgggcaaaactgccgccaaggctttgtaagatcaggaaattctaaaatgacaactgcaccgcagttgcgagagcatattttagcaataagcaatgaaatcaactacttgaaattcacgaatgttcgcgcggcgccaagacattgcccagcctcgtgtgatgaaatatttttactaagctggatttcattgtgtaatgcaaagccaatcgagcatatggagcttcgtcgagccataagtgtagcgtatatctcccataatatcctggccttgtcttctatctaatgtgagtccgatttcagtcgatttttcacaaagagttgtatcaacgggcaatccatatattcactttcttcttccatctgatgaaaacttatactaatctgcctcaacatgacaattatgggcaattaaaaattgacgatacatgttatacagcctagccttcaagagctttttagtcaaatggatgcaagcccacgaaatactagggaggagatagaatgggccaaccaagacggtagggcccagcacgagaatcgaaaaattgtggatactcccaacagactgcaatgctctttacatctctttctcttactatcgatactacggtcctaccctcgtctaggctcgaaaggttgcaatctatatggattaagtatactgcaaccaaagacgtcgcttactgtttcggaatctcgaaagcaacttccagccgtgagagagccgataatgtatcaaaaacccaagctccatcaatgagtgtgactaaagtatagcaaaaggctttggtgactgtgggaaacacaagagggtatcttgtcatgtggcgatgcaataaaacgggcatttgcaattatccaaagcgcattggaagatttagtatatgaacgaagcatcttggcgtaatcaagacgtataaaactattttactcgtgagcaaacgacactgactttgtctgcttcgaattgaatagcactcaaatcagcagacatgcgtccgtatctgtagggtgtaaagtttagttggaacgcatagtttaggtggcaatgcatcttttagatccagtcaacaatagtaccatttcttttgatctatatacaagcttctcatgttcagcgtgttgattcccgtgttcaataaatacatagggtgatcggtgaactttcctgtcgtccattagacgatggggaattttcttaaatacaaaagtcagaattgaagacagtgaatatacaccgtaggcaggaggtgaacgaattaaacgtgcaaataaaagggcaaaccatgactcagaaggtaatgaaaagagcaatatcgagactcaaacttgtaatttttttcagcctcataaattcgcgtgatccaaagtagcaattgattgattgtgatcacgacgtcagtgtcgacttgctgatatcttttgacaagctctgacttgtcactcttttttccacccgctccatcgttcaaaattccccgcatcgaggtgaaacaaatctagcattcgccccacactctgattgaccagatcctcaaccgacgaaggtctaatgtagaatgctggcacaggtggaaagattatggcaccactccgtgatgcagacaacatatttcgcagatgaatgtcgctcaatggtgtttctctagtcacaaggaccaactttcgcctctctttcagcgtcacatctgcggtgcgtgaaatcaaatcatcgcagaacccggaacttatggctgcaagcgtcttcatactgcaaggcaagatgatcattccatctgtgtgaaatgacccactggatataggagctgccatatcactgatattgtagacgtgatcagcgagagccttgacgttggaaggatggtagtctgtttcgtatttgatggttgattcggcccatttggacattatcaggtgggtttcgacgtgaagatggcgaagggcaacgagtaaattgattcccagtattgttccggtagcgcctgtgattgccaccacgatcttcttgcgtggctcacctgcttggggctgactggcgggcattgttggaagagtcttaggtgagcaccccaagttcttaaagagcatggaacaatatcctgtgttggtgctggccgttatggaagcaatggccaagtgttcaaggggggccttttatttaaatatgccacccctctaccttcgttaatctatcgtagccataaaagtcatttatcttgcttaaaatcattgtggtggttgtctttggcttggcaattgctgcccgggtgtagatcggatcctttcgtaacgtatctcctgatggacaaatcgcattcgaggatcgaagctacggctagtggagatcttcggcctgccgggcctgtcggaggggagtgacaatcagaagcctacggatagatcggccggggagatacaagagggtcatagtgtggcatctactatgacgagaataggtaagatcagcatcccgcggctaccacattcctatctccccggtcatagtttacgctaacatccatacatactaaatcgcatgattgagacaactaatatatttaccaggacttgagcagacaaggacgaatccaacacgaatttaattgactcgacttcgtgagatcatctacctttgcatcaacttcaccgcgcaaaacatttgctcaagttatcgccctctctgttattcctgaaacccaagcatcgaaacatgtctacaagaaagctctctgccgcaacatccttgcgcacattccttgaagaatgtaaggccgagggagaccttgtggaaattgatctggaggtggatccccatctcgagtccggtgccatctctcgccgtgcatacgaaacaggtagcccaatgccccttatcaacaaccccaagggtaaagatggtccagatggtctcttccgtattctcggtgctccagtgggtgtccgaagcgatcccgaaactcgcaatgcccgtttggcgaagtctatcgggctgccttccaacgcaactggacatgatatcatccagaagctcctagccgccaaaagagccgacccaattccatctgttcaagtgaaagacgcaccactcaaggagcacaagatattcggcgataaaatcgaccttctcaagatgccggttccacaaaatcacgtacacgacggaggaagatatttcctcacatacggactacacagtgttcaaactccggatgggaaatgggtgaattgggctatcactcgctgcatggtgatcggcaaacggcaattgaccggccttgttgatgtgaatcaggacattggcgccatctgggcgatgtggaaggccctgggaaaggacacaccttgggcctgcgctcttggtgttccgcccgcagctgtaagctcttacctattctttttgatattctgtgccagcatcctacgctattttccagaacgctaatatctgaaaacccttcaggccgtggctagtggtatgccacttcccaagttcgtgaacgagccggattatgttggtactctcacaggagttcccgtggaggttattaagtgtgaaacaaatgatcttgtagtgccggcacagtctgagttggttcttgaaggagttatctcggcaaccgagaccgcgatggaaggccccatgggagagtatcacggtcttcttttcccacccaagaaatcgccacagccggtaatgacggtcaatgcaattacctaccgaaccaaccctatagtgccgatcagtgtcgcaggccgtgctccagacgaaacccataccgtttgggccctgtccatctgcgctgaaattctcgacttgttgcagcaggcaaacctaccaatcaccaaggcctggtgcccatacgagtcccaagccatctggtacgtcgtccaggtcgatcggaagaggcttgtagagatgaagaccgcgcctgagaaattctgccgccaaattggggagatcgttttctcctccaagcctggtagattcgtgccaaagatctttgttgttggcgacaatgtcgatcctagtaacttgcgtgacgtcgtgtgggctgaagcgaccaagtctcagccacaggccagtgacttctacttcgtgggcaactatccgacatatgatctagtgccatatgccactcacggcttcaacccccgtgggcaaaaagccaaggtcgtcaggctgtgcatgttgcctgaggagttcgagaccttggaccggccatgggttgaagcttccttccgtggatcttatcccgaagaggtcaagaacaaggtcctagaaaactggcaggcgtacgggtttgagagatctcctgtgaacttttaaaagtcttattgctagggcctttcaactgtgctatctggtctttacgttccttgacgccctaacctttgcttgggaattgaaacggacacacccaactttctcgaacgaagtagaagatggtgttttaccactcacagggttcttcgttggcaagggtgaaggggaatcttgatctgttctaatcattcaacattcacggccccgctgctaatgttctgattctcaatgcatcaactgccgaatcagctcgaaggagcccctttgttttgctactgtaccaaaatcatatagaaatacatacacaaatcaaatacctacttttcgattcactcaatggtttatcttgccgttcaaggttatacctacttctgagattcctaccacaaagaaaaacatggaagtggtgcaagactttgaaaaaaagtgatcgaaaggataccggcaaggttcaagtgaagatcaccagtacattcgagcctggcgggtgtgttcgtacgaatgtcatgggaagagccttctcggttactttcaactatcgatatgaagccgcttcttgctgtcatcagatcttcgctactcgacgtcagctgccaagttcccacgagagaaaatctcccatttcgggacaaaggctagaacaaacaatgaccttgcgatagttgctatcctactcgacccgaaatggccaacggtcatcattgaatcgggatggtctgaagcactgaatagatcgaaggaagatgtttgtcctggctaggcgaatcaggccagcaggtcaaaatcgcactgacgataatggttactccgggggagactgtcacaatcgagcgacgggcactcaataaaacttttgttaagccaatccaaatgatgcagattactcgagcgaagtccgttgcccgagatgccaattctcgtgttaaagaacctgcggtagaattgagggacattaaccagcgagtctccgaggccgaggccgagttcccaaggaggaacagcgagacagattgcatatatcatattccttcccttgagctactggtgtaacggaaatatgtaggttcccgttgatgctaggaagaaaacgtcagcttaacggcactagttagctaatgacagaccacttgctttttcatgatgataatatagctgctgctttcgacgatttgcaggtgcctcgatacgccctggggaagaaatcggcgaatcggaccattgggagccgttacatattggtacgaatcgaccgtctggaagcgaatagagaatatcaacttcattcattagtttccctgaccggataaggattaggataagggaggaccaatacctatacattacattacaccatacatctatacatctctacatatggagtacacaatacatccatgcgggccgtaccgaccaggcggaactctaatgtaggcacccgttggctctgaagtcatgggatattaaccagctgcacgttgcacgcctctatcacctcggctggctcaatatagccacaaaaggtggtcccggcgcaaaacaattggtctccgaaggacccgactcttcccgctctgtcgccgctggtcctggtcctcggtggccatctgcttccgcacaacccagacccagcctggattcggttggtatctgtgatattgatcaaatcatccatccgagatagatagtgctacttttagttaggacggtcataattctacccgcacctcgttgaatatgtattttcacactaactatgcatatttatgcccttaatgcattcaatatatcaatgtgctagttatttatatgcccggtgcgcatcccctagtgggtcaagtcggtcctcctgaccccattaggaatagttggccttgatgtcatggccccgcataaccccgcaacgttgaacttgcacccttccctaaattcaactgcaatggtttacggttgcagtcttcacctcattctagatcgtttgatgcgaaaggagtctaagctaatcgtatataaaatagaagtagagaggagaatcagccagagatgctaaatgtgacctgtcacagacgggaaggtctatggcactagtgaaatataagccagttattaagcttccttgagtgcccaggtggagacctgtctatttttaccttgtaaggctaaattaaattgacacgggcggggatataacggggattttctgtctgttagcgtttctcggcatccttggctgagaagcttaacacattctcaatataccgtgtcgatttgtctcgtactcgtgatattccctcccgcttgtgcaacatatttgatttttgtgacgtatacgcacaccaccttggcaaaccgagcagcctggattctacatgcactgctaagaacccgtctttactcacacatagcgggccgaggattggcctaaataagcctgcgacgccccggggccggcgagacttttgtactggccaggacaatccacaacttttagtctcaagccttctgcaactgcacttattgcttgtcggtaaatcccgcttccggcttcgttactgcgacctgcagcaagcgacgatccagggacttctgctattcctggctatttttaaattcccgaggggatgaattacctccaaaacctactgcagtgaggggtgattctacactaaagtctccctatccctgatctatcgcgctctccgtgcccgtcccgtctccccgcctatgacggtccatatcccctcatagagaataatgtctcataacaggttctgcagagccgatattccgatgccttgcctcgtttagcgtcgccatgaggggaacccctcagcgaatatttggagaaacgcccgcacctgattagagcgaagggatggtgcaatacggaagcctctgattcataatgttaaacttttgttggccaatctcaagcgtagacatataaaaggcggttgggacgtgatagtagcccgcttttaatttcggttcaacctacttccttctcagttctccccgagtttcttcgaaacgtcaatatgaagttccaactcttcgttactctgcttcctgcagtgttacccttggtgcatggtatccctgctcgcagggatacccccaacccgggtttgcgaggaagcgatttgctggttggatattcgtcatcgaataagggtggcagcgactcgccacctgacatcaagtatactcttgttcctggacagacggaagatcccaatattgggccgtacctcgatttcgagaaagccgataatccacagccgatccgtggttccgcgggggctgatgatcccggtccgagtatgcaatgctattctgattggatgtataatacagagtacactgacattcttttagggaactattactatgacagaatcaatagtgataagcttgcaccgcccggaactgaccatggacagacgattaatgcgcagtggccaatgggtaagtctggtttgtgcagagaaatgtacaatttgctaactgtatgctaggattgagccacaacaggtaatcttcatccccgaacaagaacaccgcagatactcatattttcttaaggcttggatcagatggagctggttgggctcgccaagagaacataaatgtgatgccggatgcgacgctcatggccggtgtcgatatgcgcttggcgcctgccggttaccgtgaacttcactggcatgtggccgctgaatggtcgttggtgttgaatggatcgtgtcgaatccaggtattggctcatctcgaagggattaaataagtactaaccagccaggctgtgaacgagaatggggagacatttatcgacgaccttactgctggcgatgtgtggttcttcccaccgtgagtattgtaatgtgcacggataatgctttatactaattatttatgagtggtgttcctcattctattcaagccctagacgatggagtcgagttccttctggtattcgacgacggtggcttcaacgaggataatacattcctcgcaacagaagtcttcctccacaccccggtaaagaaaagcagatcttacaccaaagaaatccaattgctaacccatacacagagagaggtcctctcaaagaacttcggagttgacgtatcagcctttgacaagctccccgccgacgaattatacatattcaaaggcacgcccgccccagcagacatcgagaaacagaacgtgacaacaacagctggcatcatacctcgcgcccagagctactcataccatttctccgagcagcccgctcacgaagttgccgggggctcagtgaagatcgtcgacccgctcaccttcccaatcgccagtaacttctccgccgccgttgtcaccgtccatccaggcggcatgcgcgaaatccactggcatccgactagcgacgaatggacgtttttcatttcgggccagggccgcgcaacgcttttcacggccccgaatgctgcgactacattcgattatgccggtggtgatgttgggtacttcccgaagtctaatagtcattatattgagaatactggtgacgaagacttggtttttgtggaggtgctccaggcgcctcagtttacaggtatttttcccttgatatatgtttggggtttgtgtactaacaatagtagatatggctcttggtcagtggatcgcgtctacgccgaaacaaatcgttgcggatacgctcaacctcagtgaggatgtacttagcagcattaagactgagaagcaatatgttgtcgctggtcctagcagttagatcgctcacaagtgggctgtttataatccacaatattgataattttcttggtaacttagcaaacctttactagagatgctttatagtagaccatcaattctctgcagtaatgcccaaggctttcgtacccttggataagcagcgagatgagctatcacaatccacatattcttcgtcgttgaacataccactagcagaaagcggaccagcgcgtcatggtaaataacagaaagaaatgcctataacccatcgagacaagctccttcttctccgccttatgttaaggcctgtaaggtgggggtagatcaaggccatcatccggactattcccactggtatgtgggtcattatggtagccaggaggaacagcctctcgatcgtgactcttgggatccaatcccggaatagtagacccaagcacagatgcagattgctaagaatggtcagttgatgcagctccttgctcgatggaattaacttaccccggcccctgagtctgacccatgatttctaataacaataggatcatgatccccagtcttcccaaccaattcattccgcttccaaataccatatttaagaaccagtccctgaaagtccgaccgctcgatgacgcactcagcgacaacgcagtttgtcaaggtagctctctcgatttgactgcgcgagaccgtcgtgccggttactacactccgcttcaccgcgctctggtcttgaatgaccgactgtccgactgtggatcggtgcaccgagctctgactttgtagagtgctgtttatgatatcgctgcgctcgaccgaggccgcgtcgtggaactgcgatttttgacccgtgctccggctcacgtcttctgtcttcgatagtacacagtcacttaaggtggatcggttcacgcaggaattggtgatcgtgcagttgttgataatgcatcgagttatggtgttgccgtccccgctcggtgcgctggcttgggctttatcgttgtccatgatagcgctcgggatggaagtatttgacaaatgaacgagatatgagtaattctctggatgtgtatgtttcccagagcaatctatttcgtcaagaaatgttttggggaaatgtggaaaatttgcgaggatgacatcgggtccgaggctcaacaaagaaagctgttgcctacaattttccagtttgtaacttatatcggatatcctatgttttatatagagtgtcatctaccaggaggactacattagcggaaaatatatataccaacatgattaaaacattgactacgcccttcagtggcaacaattgatttctgatgtccacaaggtccccatgtatatattatgtttatgtaccctttgaagatatctgattctgagaattgtttagtatgcatagactcagcatccgcatggccaattatcgttctcaggcatggtagttggaccgtgatgggagacaatagaaaactccacccccaattcccgcaacgtttcaataccatcctcccagccctccgtgctctctttctggccctcgccatagaacctcctgtatataaccgtccgcagatttggaagctccccggcctccacccgttcaccaatgctatcgaagaaggtaccttttcggtcgaattcattcaatatgagagtctccagactggcaggaagacactcatcaagatcggatgcaccaaattcgtcacatgggtttctttcgtggtacgcatacgtctctatggggattgtgagctgtttcaaacagtacaagcggtcgaaagccggcttgttttctgtatccatcatgtcgaaatcaagatactccacatcagacgagtcgctccgttgtattgctgcaatgtactcggatcgaaagccctctctctcgaatgccccgctcggctgcgaccatccgcctctcatggtgatgtgggtaaggcccgtagggaaggcgaggatctgtccaaatgtagatggttcaatctgacagctaaccaacgccagatctttgagagctgtcttcttaggaggaaataatttcccaaagcttcctgggcgcaaggagtctattatggcgccttggatgtggagcttctcaagttgttccatgtagaaaacaatctcgttttgactaaggtcccacccatctgaccaagaagtactcttgtaggccccgagatatactaaagaaaattagccttttgctcactccatcgagtcagattcaatgatttacacgatcgtagcccctgtcccacgtatcgactggggggctcaatctcagcattatctttgttttgcatcaggaaaacgagtagcgtgcggttgattttggacggcacgctgcgcaaggtcaggctttcaaggttttgcatttcagtgatggcatcaatgagaggataatagatttgatcgatctgggcatcatgaaagtgttcctggaagtccaagacaagagaagataaccaagagctttgctccaatgtcctcgcaagctgctcacagttgatcggattcgtcaaacagatcgaagtgtagagtaatggcgttgtgagaacctggaatttgctacaagtcaacgtaagactgtaaagagaagatggtgatcgttgaaggtgctgaaatatcatctccagcagttcaacaggaagatttagtaaaatggagtctgggacagtcatggtcggtagattgtgacaagagagaaaagatgcggaagaagtattgattgtctatcaatgagcagaagctacctagtgaagagggaacactgcaacgaaggcagcaggggtatcgacagcgaagactgggtaaaagcagagtcgttcactgaggagaacaccgggatgactaggtactggtggggtattttatatccatggaggatcacatggccacttagtcatcctgctctggaatctgggggacactacattattgagtagtcagaaatcagaccaggaactggttaacatgagtgaaataacagagtatctgaagaaacaagcggatatcttatgccgagctcactgactcccctaaagcggccgacttgcaccgacggctagcacagctatggccatcgaagtcctataccccgatattcttgtactccaactagatgcgtaagtaaatacccagctttggtcgacatagaaaagtctacaaatctcacaggtatcattgaagagtaaaagttgctattatgtaaatataagttgaaagggacttcatcccggaaaagaatgtacatctttagtggtttagcaaacgtatcaggtctgctgtaaagccataatatatacctgaactgttccaacagactggacctattccttcagatccgcacatccgagggcgagggtgccaccctaaaaccagttagttatggactctccgcggatgagtctgcgatgtagagtatcacttaccaggaggttagcctcggtgcagcactggggcttggtatcacagctggatgcctcgtacccgtggcctgtgagaaatgttagaagatatcccaataccatctggtaaacataacaagatagtccaaacatacagagaagaccaatggatccaacgatgttggcagcatcaatgccaagagtcaacaagagggggtcgacaagggggtcgagaggagtggtgagagttccacagcagaggaggggaccgacacattcagaagtatcagagcgcttcacggagaggctggactcctgagggagggcggacaccatgccggcgccagcgagagaaaggacggagaagatagagagtctcattttaacggaggtttcaagttggttgttagaagaagagaggagtagttgtgatgaagaaaggattgcgattgtggatgatgtctggaatccgtggaatatcctggtccttatatagttttcgagacaggatatctaggtatcaattgcttccaagaccacccctatgttcaataattgagtaccctgatgatctaggtcagattgtggaaactcgatttgtgagtcgtaaaaatgaacccccgagtagttcctttctcaatggatcagaagatctgcaaaactctagatagcattggtcccagtgtaagaggtcatgtgagaggtcttgaccacgaaccgaggcagagaggtgctggaagggcagtccctggtactggaagagtgaactagttccttagattgaatcacatagttcatgatgtggatatccatgatccagatgggttgtaagcgagctgtcttggctgtcgatcactcttgctccatgctcactgcggagtaactccgtatcatggaaaggcttgtagtcactggctgcaaatgccaaatcaatatacaaaaccaatagccagcggggcaaaccccggttgtttcctctcccatttctccggggatttccttatcagtggagccggttccaggatcttccctggcaccgaatcagaactgccaagacgtcgatccatcacagggaactcgcagagcccattctctccgatcgacctatcaaccggaactcaattgatgaacaggaaccaaatctctgatccgtagtgctgcagtctccgcaatctgaaattttatgcagttggcttgcgatttgtcatttccaaccccggaaaaaacgagatatttgagataagtctcgcaccgttgattgcacggcaacgaactagttttcgagcaccaaggggttaacattgtgttgatccaaatgtcttggactcttggtaaaccgatctgggcaaagttaatccggatgaccattgttcttcattggatcacttgaagtttcgtacatctcggcttcccctgattgtcgtcatggtccgtgacgatcttgataagtatgtctgaatgagttacgtgaacgattggatccaacattagaagcagatatcgatgctgtgccttgtttagtctgtcaactaagagccgtggtcatcatctcaaacatagtctcaaatcatatcatcttggctttcaggggattcggtatttgtcattatcaattcgaccatctgccgaaaaacaggaaaagactgggcattctcgtggcgggatctggtgagatcctgggtcaggacttaacgggtcattgttggccatgggcagagttcgcatgggcctgcaacatttcgtggaaatttcttgaaattcagataggattccggtcataacgatgaagaacgaagtgaccagggctggtaaagaaacatgtggcggtgtccatgtggcggtgcttgttcacaccgccacaccctcgcgacacaaaaaacctccccccctcnnnnnnnnnnnnnnnnnnnnnnnnnnnnnnnnnnnnnnnnnnnnnnnnnnnnnnnnnnnnnnnnnnnnnnnnnnnnnnnnnnnnnnnnnnnnnnnnnnnnnnnnnnnnnnnnnnnnnnnnnnnnnnnnnnnnnnnnnnnnnnnnnnnnnnnnnnnnnnnnnnnnnnnnnnnnnnnnnnnnnnnnnnnnnnnnnnnnnnnnnnnnnnnnnnnnnnnnnnnnnnnnnnggtgccgtgggggcggtgtttttcccccccgccacaccctcgcgacacaaaaaacttcccgccttcaattaatccacaccacattccccggggttatcgatcaatcaacccctctacctttttgatttttgagcagttgcccagcgcatattgcccatagatcacaataaaaatgccttcaacatctctcgccgacctggtggccgccctccccttggaggacacctggggcccctccacctccgccgataacatgctttccggtgtgccatatgctcctttctccaagggcgacaagctgggccgcatggccgactggaccgccgagaccaaggagcgtcagaaccaacgtccccagtacaaccgcggtttcagaggtatgttcaccttttttctgtccccaccaagtttctctttcagtcgaatagcaatggctaacagtcccattagaccagcaggtgtacggcgccggtacctccaacctcttcactgtcgcagccgccgaggacgagtcctctttctccgtcgttgacaacactcgcgtccagaagcgcggtttcggccgtggcggtggcaccgttttccgtggccgtggtggtcagcgcggcgctgctaaccagcgcggtggacgtggtggattccagcgtgctggtcccaatgttggccgcggtcagcaaagtggctaccaattcagcgaccgtggcggcgcccgcggtggccgtggtggccgtcgtttcggctggagagactacgacaagccccagcgcattcgtgaggcatctgtcaacattcgtcctgactggaagatgctcgaggaggttgacttcacccgtctgtctaaactgaacctcgatgctcctgagggcgaggacctcgagacctacggtttcctccactactacgacaagtcctacgacaagccccccgtcaagaacgccgagcgcagaatgcaagccctcgaccgtgctgcctacaacgttaccacctcccaggatcccgtcatcaacgagctcgccgagaagaacgccgctaccgtcttctctacctccgatatcctgtccatgctgatgtgcgccacccgcagtgtctactcgtgggatattgtcattgtccaccagggcgacaagatctacttcgacaagcgcgacggtgcctccttcgacatggtcagcgtgaacgagaatgccatcgatgcgcctctcgaggccgccgaggccgccggcaagcaggagcagattaacacccccaacgccctcgccatggaggccaccatcatcaaccacaacttcgccctgcagactctgatcgagtccgacaagaacaaggtttccttcgccaagcccaaccccttctacgatgagaccgaggaaaccgagcccctcgcctccaagggttacaagtaccgccgcttcgacatctccctcgagcgggatgaggagcccgtctccatggtcgtccgcacagaggtcgacgccgtcatgaagggcggccccaccggtactgaggaccagcagctcatcatcaaggccctgaacgagttcgaccccaaggcccaaggctccggcggtgccctcgactggcgcagcaagctcaactcccagcgtggtgccgtcctcgctaccgagatgaagaacaacagcgccaagctcgcccgctggaccacccaggctatcctggccaaggctgacggcatgaagctcggtttcgtgtcccgtgtcaacccccgctctgctgctgctcacgtcgtgctcggcgttgctggctacaagccccgcgagttcgctagccagatgaaccttaacctcggtaacggttggggtatcgtccgtactatcgttgaccgtatccgtgctcttgactccgacgagcccgccgataaggtcaagaagtacgtcctcatcaaggaccctaacaagtctgtcctgcgtctgtacagcgtccctgctactactttcgaggaggatgatgaggagcttgaggaggagaaggagggcgacaagtctgatgaggctgatgagtagattttgttctgatgaattatgttcttccttaaatgtgcatactcgacctaaaatttgatgcttttatactctgactatagagtctaaccacaatctattcaacaaacttcatttttccagacaaacttgacttttattatctcaataactaaaccattatctgtgcaaggagaagataccgtttggttggcacgtccccggatcaagaagcctgttacgcggatgattcattttagtaatgcttcctttatgtgttgcccgtgatgtccatagtcgagtaacacgacttttgtacaactttctcgggggaacacaaggaacgtcttgggtgcctcctggtgacttttggcggttctacgcgccgaggattttctgacgtgggtttacgggtataatgctctttttggatatggatacgcttatcgagaaggtgttgtctgctgatatttgagtatcatataaacttagtgtcattagagtagagtagagtgatgtattggaagcaaaattcaaagcaatataatccattgctctacctgataggaagaaaggcaggatatttccgatttatatatcatctgtaccgatgatctcacctatatacaaccctcccagcgggagtgtcgaagacaaagaataagagaaagaactaaatatagtaagagtcaaaataaaatagttcacaagcacaatcaaaccgaaaggcaggcaacaagcaaagacgccgagtcactccgtggcggtagccaacacaaacaaaaagacagattctccagacatcagatcataataattttcattgcgtccgaccgctcaaccatacatcgaatcatcgggcgcagacatgctgagatcgaccttggtgccgagcacgctgctcagacaatctatcaactcgaagtcctcgaccacagcaccgaagccgtagcagcggaccttagtgttgagcgtgtcgataatgatcttgatatcgtcgcgccgcagtgtcgggtacagatcgtggttcttgagacactgcagcgccatgatgggcgtgatctgtccttctgtcacgagctgtcggctgaggttgaggagtgtgctgaggtttgcatgcggtaggtccggcgccttgtgcgggtatggttgttcgggtgtcgttttcgcaatgtagctcggcggtgggcacgttgccatcagggcgtgtccggaaaacggcatgtcttcgtcgtcggcttctgtgaccgaccgccggcagaggtagtctgtgtgttcgcgacagggaccttcgagtctataggatgtattcgttagctcgtgtttgttattggatgagaatgggcctcacgttaggataaagtcaacctgcaactgggggtcggtttcgaagacacctccccgcgtaactggcatgggctgcatagtatcgacgggtgcgcacgatgaatgatccatgctcatggaatgcccgcctacactcgtgtggtacacttgctgttggggcgcatatccgattgggggcgagatcgaggagtgatccatgccattggcgcgggggctcaagtcggatgagatcgtggttgcaggggttgtgttggggttgctggtcgagttggcgagaggggcaatctgcgacgcattgctgctgccagccacagtaacaggggattggaaggacatcatcggtgggcgctccgcccggcggcgctctagatccgcttcgtattggattccgctcgctgcgagaatttccttcaggatttcgttctcctctcgtatcgaatgcatcatctctttatgttgttgaattgatgcgttggcctctgcgatctctgtggtgtaggcctctcgtaaccgcgatacttcggtctccagcgctcttatgtattgttcctttcgctcgcgatgtgtcctgtatagatcagtccagcccgatgttctcgaatccgcaggatttgtacctctgggcctgacgatttaattcctgccgcctggtgagtgcaggcttactatccggcttggggccgcgacgtttgggctgctggccatctgcaaaggcttagtcgtggtccgaccgactggctgggatcactcacctcgcgtggtcttcttcggcccggtaccacttgtggcgctgccactgccgcctcctccgaagatcttaaatatttcggcaccgaagcctttgttcgatggggtctgcggttcttctaccatgtcctgcaccgtgcactccggggccgtgggccgagccggaggagcatgggcgccataatatcagcaactaccgtgggaatgccataaacagtggatatttgcttccggtccggaaaagctcagggtggtcggggagggtcagctctggatagcttaggtggcgagaaccggggaaacccgctgcaattcctcgaccccagccttcaccagctttaccaggtttaccagtttgcagactgcttgcagactgcggagggaccagcgaaatcaattggacccgtgcattccagcttatgtggcgatttgtacgttgtagaggtgctggataccccccgatcgcgaaccaccgccagcagaccaaaaggaaatgtagcactcaccaggatagcccattgcatgatccatagggtaaaccccaccactgacagccattataagagttttcgcggggaagggagaggcaagggagaaggttaagtgtgaaaatgagtcgagaaggtatgaagtcccgtgtctggagtctggagagtataatataaggaaaagaaagtggacggccgatttttgtacaactccttttttattttactttatttaattgtttgataattccttttctcttacgtttcttattaacggattttacgcaaattaaaatcaaaaaaaaaggcgttcgatctgtcttagggcccactgcgctataatcaaacggccgtgggacccgactcttttcgttgacagatctagaactggcagagattggctgaacggggtctaacgtcgtatcagttgacaggaatcgacaggaaaagatacgacagacacgacagaggcaaaatactcgacactttacacactcgatgcgttactagagtcatgagaagaaatgatacatagtcggtacgtccttatacgtgtgttatagcactacataccaagtacttatgaagtaccaggtacgtgcgaagtcagtgtgatcagtcaactgggctgaccaatcatccggccaataggcttggagacctccaggcacatccaatagtctcccatgctgagattatcgagattatcgagatcgcgaacattcccagcactgacaaataatacgatccctgggcatctgccctattcccactagtgcacatcgaatacaataatgcgcgcattagaaacggaataatgatccagctcccggactcgcagattctagtgcacatcgccgccgcaagcaccgcacaagatgacgcgcgctatagggcgcaagtcgccgccatcctagaattccagtgtgctacgcgccaaccgctgatgcagatgagcaagtctttttccaatgatagagacagcgcgcatccattctccgctggtgccgccgtgcattcttcagtgcccccgacgactcaacacgaggcctcgccaatattgcgggaggcgttccggcccgcagacacgaccttaccctcggatcaacgcttgattcctgagacggatggcgcggctccacgtaacatcatctcaaatcaattaagctccttagagagtcttatcagcgtcattccagactcccaacccgagatcgccgacgagctagtccacgccgagcaatctcgtgcagaactatcgcctcaaccgcagcgtgctccaccccccaaaagacgtcgcatagccccggcctcccctgatccggctcaaccggttttaatttcagactctcctgcaacggaccagcccgctgcacatcacagagtgatctccatccagaaccaggtcccaatatccagcctaggttcagttgagggcccttccacaccctcgcatcacatgtcgaccaacactacaacccctaatcccataaatctatccactctccccctcgaaatccaccctccaagacccccaatctccactgcctcgttcactacccacataaccccaaccctatccatgctcacagagcgcctaaacccagcacgcatctacaacccatccactcaaacccgccccctcgaccccttagaacggggctactggctcgtgcagctcgccatcgaggatcaaacccacgaacgagaccgagaccgagatccagccgatcttcctctagtgccatccccaaactccaagcatggaaccactaatccaaatgcaaatgcaatgttaaactcaaacccaaaagaaaacaaacgatcctggccctccccgctcttccacgccttctggtccttcctctcggacttcgtaggcagggacggccgtgcgggttggggcgtctggtgtattcttgaggctgcgacgcccccgtcaacgcgctcgtctaacacgcacgtctcgcttaaagtctatgcgtggggcgaggtcgctatgcacgtctacctgttgctcttcttggcaagtgagcgacgggttcgagggatgggtgttcagtggcgggatgcacgagaggaggttgttattcagatgccttaggatatggtccttgggtagtttgtttggtttggggatgggaaggcatgttgatatttggttgaaattgtgaaattataaattatacccccatagctttgcattgcgataatatcatttgaaattttgaatcttcaatttcatattttgatagaagaagggttattgtacatgctgaaaagaagaagaaaaagaaattccgtcgaggatgatagtaaacaacaaggagatagaagtgaaagccatgttttcgcgaggagagatcaatggaaatgattgaattcaataaatgagcaagtcggagtcagcgagtctccgacggtccctccgatgcgccaggtcgccaattggaggaaagaaaaaaataatgacgaaaagtgtgatcaaatcagtgcatggaactagtactgcagttcgccgctgccagaggcatcgactgcatccagatcctcgtagctcttcaggctgcggccttggacggcttcgcgcggggccatgggacctccgctggaacccattgagtctgggaacgggttggcagcggccatgttggctgcggggtggccagctggaacgctgacaccaggaggcggtaggcgaccaccatacatgcctggcatgccgcggggagggctcagtcggccgtttccattgaatcggcgacggtcgtacgggccgggtcggttgttgcggttctggccgcggcgcatgggtccgggttggtgaagaccaccgtcgtgtcccattgcatttccattccagccggaacccatcatgccgggaattggagggaaggtaggcatgtttccattgggggcgtagggcatgctggcaagggtgaatccacggggagtgccggtatgaccttggccggagccaagtgggaagtgaccgttgctgttggcatcggatcgggatggggcaatgcgtgctgggtctaagacataggcattcactaaggcgagctatgatgactgttaatactgggaataatcgttggatgatcgcacacttacatcgttcttgatgccattgaaccactctgtatggcgcttctcgacatgcttgcgccagaaggcctcggccttaaaaagcttggtacattcaggcgccttgcaccggtacttggagtcgtcctcctgcttcatatatttcagaagttcatcctcaagcgcctgatcgacgggcttgccgccgagcttgctgagatcgacgttctctggctccaggatctgcagtaacttgtcttcgaacgtcttcacccagttaaaggcacgttgcagttgctgttcagatttggaaccatggcgctgtccacgcttctcctggacaggcgaggagggatcttctccttcctcactaggttccttcttcttggccgggaatggctggccgagcgcgctggctcgggccacttccttggcctgggtggaaagtccggtgcgcggacggcgaaggtgtccaccagggcacttgcggccgagttcatggactgagtcactttcaaagacacagaaaaagcagaagttgtagacacgacgtaggtattcaacaaccaagtctagcttcttcttcttcactgcaagttcctcatcatccacatcttcttcttcggaaatttccttctcttcaccttcctcaatctccccttcgtccccttcatcgccatatccgtttctctgcttcttgacactgactggtcccgtagcagggggctgaagctctcctttgccgcgcaggtcgtcaacatactcttcgatcttggtgaaaccatccacagagatgttcatttcggaatccagtttggaagttaaacgtttggccagctcgagatcacgatcaattcgctcaggtgcggagaacagatcccagagagccttcttgcgcggctgagcaggggggacatgaaccccgacatggcaaacaaagtcaccatggacggaatcatggatggtcttgtcattgacagcctcgagagctttctcagccgggctgattgtgacaccaccgttcgcacctccatcttgatccatattttcgaactcttcatcgcgtccatcccctcgctccactgtggtgtttgcggaaggatgcaacatgatccatcccatgcgatggaattttttagatgggttcgggtcgctgaggctcagccccttgaaacctccatcttcctcgccgagatgctccttacaaaactcctcgatcttgctgcggctgacgttgggtgcgagggtttttataaggagcgcaggctgtgcaagagcttcgtcacgaaggtctccgccacggactggaagtaggtcaagcactcccatggtctcagcggtagccgtagtctcgccttcctccttttcaaccacaccaccggcaccgtcgctatcgctcttgtatatgccttcaagggtaaagtccttgaaaaggttattttcaatatcatgctcccactgttcatatgcaccttgtcgaaccgtcatgagacgggcgcgaagaggatctctgacttcaggaagatatcgttctttgaaccactcctcgttacggtgctgctggacgaacagcctggccagtcgaatttgcagatcaaccttgtatgtatcataagctgcctggatttgcgcacgttccttctcccgatcttcgcgcgcctcgcgctctcccttgactcgacgaccgccgtttttggcgcgctccttctcctcattcacagattcctccaatctccaccactcggcaaaccaattgaatccgacttggaaatccagtgtaagaggattgggcatcgggttggtcggaataggacgcttgccaccactactgctgtcttgtccgggcacatatcggtcgatgttggccacagttggcgacggggcacgtcggcggtcctcgcgctctcgggcagcatgctcccgagaattgttgtagaagtcctcgcggtgagaacgacgctccgaaggctcgtaccggtcaatcacgggcgagcgggagcgcggccgtgcacgtcgccgatcttgagaggctagtcaagagttaatttcgccctcctctctccaattctcaatgatagacttaccgggcgaccgacgtctgtatgattcccccgtggctcgtcccgtaaaagaatccgactcacgattcctcccgggagatccataaccatcgtaggagtccatcgttctcaacctaccggatagggatcttgtatcgccttcgttgcgatcaaggtatcgatagacccaaggactcagcccaggtggataaagaacaaacggaacagtttgccttgatcgataagggagtcgggaccgtagggtgagctaagatttggtatcgtcaacaacagaccaagcaacttcatagagcgaaatagcgatggtggcgactgggaagttcacgagggataacagaggcaggggtcagggaaaataaagagacaagaacacactgctgctggcgacatgtcaaccccggaacttggcaggggttggaacatgtttgcagcaggtggttttggatagcaaagagagattatgaagaaggctgttggccagagccaatgctgttatgcatataaggagtcatagcccacagaatccagcaatgcgcagctggcgccacggcttagaaaggaagaaaagaagatgaagcaggggaatggaaaatcagggtcagaggagcggaggctgatagaaagagaaagggcaagggacaaagccaaagaatgaacagaatccgattggagaaagaagagggccacctacaagaagcctcgagcgataacgtgacagttggtgataaagggaagaaaccgagaaggcggacgaagctggagcaagcttgggcgcttagccgaaaagggtatggcgtcacggggatcactgacatccgctgattggcgggtcctcaggaacaaggccagatgacaattgcctgccctaacttggcgacaagttgagtggaatttgcaagttaagaataaaacgagaagagggagggaaaggaaaattggttaagttggaaaaaaagtgagcccagattagccacgctaaggccgccacatatgaatgaagtacaactctagaacagtcaggaggccggcaacttgactgttgttagtaatttacttcatgggaatctgcttcagtggtgtaatacttgtctcactgaagggcctatcaacctgttcggttttctgagcccctgatcattcatgttggtcgccaggtcgccaggtcacctttcgcttgactacatgactagcgccgacaaacgaagtgatacatccatgcatagatcccggggctacggagtaattgaaatatggaacattcttttcggcttttgtgaatatgtatgtctataaattgtatacagggcgctgtatatatctaaaggatccaattgcaatgacaatataataaaaagaccaggtcttctcgttatagtcactacaaggctggtattatttataggaaggctaagtaactatagaacgaagcccagattacgcaatcttagaggaagattcttattagagcgccagagcaacaaagaaaaacagtttcacttggggtcaacttttcctcttcacatacctaccataaccacataaccctttcgatataaaccttttgacagagaaaatagtgcataggaagtttgggtgtcatacagtacccctgtcagttggacatgtattgttacttacgtagattacctagtatttccaaatgtgtattcacttgtatatattcaatactccgtacatgcaaccgcctacactctttgagtgattctctagctccaccgccgagataaaactagatcatattagaatggcaccggaatatcaatattcctgtaccagtctcgataccgtgatttacttctattaaaatacggtgtctcgtcgcgtaactatattggcgatcctagggaactagaattttccatggaaatgcaaacaaggcaaacaccagagcttgacagtgcctcgagcatctggcgacctatcactcgtgctcatgtctaagtgacggtatgagaggcttactcgacaccagaccctgcaaatagtgacttgcattaattgattaatgtatctgcagactactcatgaacctgcttatcatcatactcagcctgtcaaccacagtcctctcttcttgacgccttgtactgtatcttcatgagatgttcatcatttttctcagagtctgaagagacactggttttaccacataatcatcgatccctgccaattgcgcttgttgttgcatctcagcggaagcgactccggtgacggccatgatgcaagcttccgggatgttgttctctttttcatactctcgaatctttgtcgtggcggtgaggccatccattaccggcatggagagatctgacaaatcaggtcagaggatattttcaagactgaggtgagataaaccaacccatcagaacgtagtttatgcgttgcttggactctttgtatctgccaagcgcaatcaacccattcgtagctgattcgtagctgcagcctagtttttgaacaaaggtagtaaggatctgcaaaagagcctgttagcacacctaagggattggcagggactatgccactgtacctttaaattaatatcattgtcatctacaataagaacgtgcgctccgtcatcggtgatcggtggctccaaggtaacaggaagagttggcgcgggggtctgtgcagctgtgttagacattccagatttgggccgagtatttctgcgagcgtcatggtcgtttgattgcagagcctcctgcacaaacgccgtatcacatttgggataaggatcttgatgggtctcagatagctctaaatcagccaatattgagttgacagcctttcgtagtttttgggggccatatctattccaaattagcaaattagcaaggcatttgtgagaatgatcctagtacgcacggctgagagacgcgaacaagattcgccttgaaattgccctccgcaattgaaagcttctcacccagcaccaagaaagacttgaaccttgtttgaactgagaacaaagaaccgtcctgcagcgtctgcagtagttttgcttcctcgataactgcaaaatcgccttgggcgttttcgactgactctgaaaatgaaacactcaagttcggttgggctaacaacacctcgccgacggccttttgaatcgatagtttacgttttgactctgtgctttgaatgccagtgggtgtctcctgaaggtcgggatagccctcgaagccgattagacatactcgagtgggcggaattgggacggccggtttgctgtacgggtctaacgattcagaactctccgcggtcaaggattgaaccgggatgtagatatcgatttgtgtccccatacccatttcgctctccacgtcaatgtgaccgcccaggaaggtgacgagcttgtgcacaagactgaggcccaggccaatgccctctgataatgattcttcctgagaaaagggagagaacaccgagtgtcttaaatactccggtgatataccacggcccgtgtccgttactgataggtgagccagcacaggttcggaatcagaattagggctgatatttgacaaggacacttcgatgacgcccttccgggtccatttcatggaattgccaacaagactcatcaaaattctcctccaagcaccagctaccgtacgcactttccatggagtcttctcttcgatccgaatgacgacactgagattttccatgtccctggcatttgtagaggggattgcaggggtcaaaaggccctcaacgtttgactggaagctctgcctatccccggtagtctgcgatgaatacataattccagtcacgtcctcaatgaggatgcccaggtccacatcggtcatcaatgtcgtcatatctgccatcaagctatcctccctttggatactattgatcttggtgaagtctagtctagaagtaatgatagatcagcaggagataatgcgtgaaactgaacaaaacttacagatggtccaaaacatctaacagcgttagaccgcacgattcgatcaacttgaccatatctacctggaccggctcaagggcagtcgctcgtagcagctcagtattaccaagaactccgtggagtggcgaacgaagctcatgactgatggaggagatgaaatcagatttcgacttctcgatggcatcccagttgacgcgggcaacttctgaaattattgaattcccgaatgccttgaaaaatccgagctcttccgaacctaaggcacgctggggtagtttcgtccaaactagggtcccggccagccagcgtgatttgttccaatcccataatggaagaaaaaggaccgagtctgcatctgggaactgtgccgctaaagtttgagtaatgtcattagaagcctccaactctgcgggctcgttatcctcaaattgatcgctcatattgaatatttgaccttcaggatatgcatcaatcattattctcaagagtttctccgtaacggcgactccggagtcatcaggtgacctatgttctgatattccaagtgcatgtccaaaactctcgcacaatgattccgatacttctgatgacctcccgttatgttgaaagggttttctattgatgaggcgccgtaatcgtcagatgtttcgttcacgaagcaaagggtggatggtaccaacactccagagttactttggtaagcatccaaaaacattaccccagcaaggtccatggaatccctgaggatagcactagcatgggagaagattgaagcaatgctttgagaaatggctactccgggctttatccgcgaagtgcggaaatgagaaccaactctatcacgcgtggtgtggttttcattcagtggagtcatcgccgctatttgtccttcgaagctggaaggaacggaggtgattcgtgtctgatcggacctttctgtggaaaatgacagtgctgatatctcttcggcgattgtcgttgactccagaactctggctgcgtgcattgaaggagacaagccgctctcaccgtcgttagccgactgagtatgaagaggtagacccgaaaatgtggcacttggtttcttcagctcagcatcggggtttggatggtcagtgacaaaatcagccactcctttgactaatttctctgctcggcggtgaaaatgcacaatccgggcgttttcaagatgatgggcaatagcatccgcaatttcttgcaataaagcaacctcgtgatccccgaatacgtcacgaggcttgtcgtccactacgcagtatgaaccgagcacatgccccgaggcgctaaacagaggtacttctgcataaaatcgcatatgaggccagtcaaccacgtaggggcgattcttgaaacactcttcggctgcaaaatttcggataatgtagcgggtgcggtccgcggttatgttgggcgtgttaagttccaacgaaatgtcctgggccgtgaataacttgattgtgtgagggcacaccccccattcaaggttcaaagtcctgaaccctagatatatgccattatttggtaaatgctgatctttatgtcgcaaggatatggacgctgtcgtttcggcgaggatgtgttgactttggccatcaataatggagatgaatgaccgatcgcacccgaatctatagacgcctagttgacctagagcattcagagtaatatcgggggagaggtatgcggtatcgggctgctcgtcatccaccggtgcagctggggtaggcgacggattgttcacatcgaaatttctgaaagtgcaatagtatctggagactatgtcagtaataagggtgctcaagactccttcggcagaaaattagatcgcatagaatgagatcaaagacgcacttggataattctcggatgcgatctcgctctgctcgagatggcaggggaagatctggcctgcgagcagccaacaaggccatatttcacttgatgcaagtggaaaagggctgagagaggaacgtataagtacgtacaagatgggagaggagttgagtcgagactggaaaagcatgatttcacaggtcgttattcttgattgccgacagactccacaaaggcaaggccgactattggccggctctggcagagcgacccgtatacttggatccggggcatcggttcttattacgattgctcctactcgagctggaatcacttggcatctgcgggcgcaacataatcctccgcaattatttcgaaaaattatgctgaggctccactagcaaaaaaaattagatatcattggctgcgcacggaacgcagaagagtgggaatgggggatcgccatgaggatggtacctcaaaatttcggtataagcagaaaccaccttttgtatcgccgtcagggggattcgaagaaatatagatagagtgcgtggcaagggaaagggggtggggggagacattcctaacgcctgaatgcatgcctcagcgtatatcgtgggtttttcaagcaggcgatcgcacaaagcctcgagcatgactagagtgatactacaagggcgtccacatttaatacgtggtgctttaatgctgccaaacattcgtatattggaaaagattctcaggatgatactcttgtagcagtctgtgccatctgcgatatagatagttccccactgaggatcatatcatagataagttcatgctttgcagaggctaggttttggcgccatcttggttcggccactcgtgattgattgttaacatacggaacttcccactgtagtagggtatggagctgttgcaccaatttcgggacgtactatactcaatcacatgctacatcagtcttcttacgactcaagaagaacgagatataatgcggtaatgcataccatatgtataggtacatatatatcgccctcaatcttgacagatgacacaaattcaggcaagaagaagaaaaaacccgttatgacagctcaactcacgatgtccccacaggtcttttacaagcataaccttggaatatttgatactagtagggccatgctcaccgctgattggctgaccgagaccaccgcgatcgccaaatcgcaccagcataacacgccacattttgacctccgatcgaacgaccatgtccggtctcttcaactctcgctgggcacccgtggatgggggaaacaaaacatacccggcgagtcaaaatgcgccccggtactggtcctccaacaactctaatcccggcggtcatagcagcgtccgtccgacgactatcacatcccaagacggccgtttgctgccgccagccgaagaattggctcgatttatgaaaatcgtcgccaggctgcgatggaaacttccatttttagctgagggataccgccttgcgacactggaaataagcgatgtcgtatccgcagacgatgtcgcgcacgctgaaataatgttcaagatcgattttcatgaatattatgctctgcttgaacgtgctattgtccacttactggcggtattcaatatatcggttacatcctcgcctcggggaccaccagataatgggaacggcgtcggtcggcctgttggtattcatcgataccacgccaatgtgctagaagccttgcgggaacagtcaaccccactctccccagttcttggcggtggctctgtttatttgcaattgcaaaaggccaaggaactgcgtaataggtggaaaacagctgatctgaccttggaagaaagagaaaagcagggtgaaagaaaggacgtcatgacactcgcgagctttgacttcgaaggtatcatctctgatatttttggtggattagaagaatcatatgttcgggcaaaagagcatgtcgataagtgcatccgcccggaggagggcactggagagggagcaaacaccgaggcggactgggggttcatggtcgatgctatggattgggaagccgtatgagagttggccaactgcagattttatggcctgtgcttgatgtgtagccagtgtcaaatccatggttcgataaccaggtgcatgctctcattgctatgcacacccctgttagcactgcaaaatggctcgatcatggtcttgagtcacccaaatcctgttatcggtgtacctcaacaattgcactcgctagtgggcggttcgaaggttccccagctagaaactttgttggacatcgctgcagtccttggacattcttgctttcatttggcgaagaaaagacatgtcacacctttgttgatcactgcaaactgaatgatgtacatattagctgaaatgtgctatgaatcaatatgaacggagttgatattttggggctaaataagcatctcaacttgtcttgctcgtcgtccaacttttctccgatcaagacccgcagatgacttatgttatctagaatgagtagcccatgtaaaaaataagtaacggttggaaccatccctatcagtgagaactaaagagctaccgttcttagatgtgatgtgatgaaagttgaaaattctgtcatcacgactttctctgcgtggatttcaagaaatcttaattgatattttaactgcctcttatttttgaaaattgctcgaaaagcatgggcttataacctgttgagcactacgatgtgtgcccagacgagaagagagagataggtaattctgactaaggtaaggttgaattgggaggcaggagctagaacgtgcacgatttcactggccttcgcgttggtagtagaaatgcagaggtgaggtaggagttgggagtgtacctcgcaggtactgtccgatgtcgtgagcatgatggatatcttggaagataatcatgtccatgatcttaattaaaatgtagcccttaagtagcttatccctaagaaacttacggcgggtgcgccgggaattttgttcatgtaaccatttcggcaatttcctgccacagaagttcaggcttcttatcacgacctcgagacaatgctttcacttcaatgatggcaaacttctctggaaatgcccctgtctctagacagccgtctgtgagtataaccatgttgccaaaggatgctttgttgaatggcgagcgtaatggagaccaggcatagtgcatctcggagagatggatcatgaggaggcgtggtagagtttcgttgatgatttgctcttccagcgcgatgtccatataggcggcagctcagctgctacttcacttatcgtgatagcgatttccgactgaaggtcatttatttctgacggcagtctcaattggttaaagtagagcctgtgcgcgatccatcttcgaggagtagttggttctagctcgaaattcggtgggatcctgtgctgagactgcgcgacaagctggaaaacacccatattccgattagcatagtattttgtatgctcaccgatgtgcgcgtatactcacccacatattccaggaactaggcggcgccggcaccgatatctgtcttctttgcctcgtcgttcattccgtactccgtaatcaagacgagcgggtggatgggatggccttctcaccatttaattctaccgggccatgtctatatggcctttcgcttagacgttaataagttgtgcataggggccagcgatcccgtgcgcgttcaggaggaggagatggaagttccatagataggtactggctggacatgttgaagttcgtagttgcctcgtgcttgaggtcgagagccttgaccacctcttctcgggagagaattgagagagatatgggtgagtgagagatatatggcggtggtgcctacctcttgggtggaagctcgtgatatttgacagttgcgtgaggttgatggagtcctttgtgtaggcatgatcaagtctatctgtgcgtaacggaagacaatgtcgtacgtgtgtgcgtgtcctgctcatcgtgtttgaggtgtaagcggtgttgctggcttcaccaaagagaaagccgcggaatggttgcacctttgtcttcttcatcaattgcgtataagatgagaaagaagatcagaatagtgagatggcagccgtggaggacgagagtaaagatggtcatgcggacgagtagaccttagggattttagactggggagtctttgaatcaaaagtgccactagtatctaatagaggttatgtaagattcactgaactcacaggttaatgataaaaatatggtgaagtgagaatgaagtgagagtactatagatcagatctgtagaagacgagagtaaatatgactgacagactctgtagaggtaaaccattaactagaggcttttagactacagacttattattgatgtccattgctgttcgactatatctcataactaattaactatagctcttagcttcgtcaatgaaatggaaaggtagaaggaactctttcaaaacagactacgtgtacgttcatagcttgctatcaccatgatttctccttattgcgacagagaaacacgaatgttacaaaacagaaaccccaaggattaccgatacagacaaagacaagacaagacaataagtgtcaatatctgcaaatatattcatagttccaaatctacaatccaatttccacccctgcccacccttgccctgcaagttcctgccaaatcctaaccgaaccacgaaagaacccaaaggaaaaagaaaataaaacaaaacatcaacactatcagtcgagtgatattcataacaaaccagtctttcgaaaaccgatattccgatctgtttttccagtgatggagaccctctaaaattcccagccgaagacccataaacccgcaacacgagacaccggagaagaaaagaagcaaagtaggaaacggggatgtcataggaaaataaaatgaaaaaagtagccagaagaatattcataatagaaacacgaaagtggatatcagcatggggacggaaaggtggagatagcacattcgggtgaaggtcgaatatttagccaattgctaactgccgaatattatgaggcggcatatgcacaatcatgtactgcccttgaagaccatacatgtaatacaagggccagcgggcgacacaatttccagcagagtaaagcagagcatgctatctctccagtctcacatatcactctcaacaagtgaaagtgtagatgcttgaaacggtcattcttgtacaaggtatctcccacgaaggaagttaccgttgaggaagaggatcgatgataagataggcaagagggggaatgagaaagaaatgaatcgtcccggcatagcgaatataaacagacatcaggggcaaatgggggtaagatagattgaaaaaaaaacatcaagcgaaaacacatgagaagagagcatatcacaaagcacatcaaatggggcatagagcatagaaagggatccatacacatcgctcgctagagaaaaggtccaagacatccatccataaagccgtcacgacaaaagaaaaacaaaggaaattcaatacccgcaagtcccctcagcaagctgtatggttcagtcttgtgggtgaagacaatgaaaatgggggcgactagccgtcctcatctgagggctcagcagaatccccttcgcttccatcagcgctggcgttaaccttcgttttcttagaagaattcgagccttcgccgtgagcttcacttgacttgcgcttctgcccaccattctcggttggcaatggcttgctgagatcctcgaaggtgacaggctgacccgttacctcttctcgtttctccatagcggccacttcatctgcagtcaggaaacgtccaccgggtccacgcggtcttcgcatggcgtgattgtgtcgggactcgtgcagataaggcttacgaccctttgatgtcaaacgcagctgctcctccagcttttgtcgcgctacgcgacgcttcaagattctatggaactgcttggcgtttacgtacagtggcgactcttcttggttgccgccgggtaccatgtcgggtgagggctggctttgttgtacgggagcctggggaagtggggcggcgatgggggcccggccgacgtggctcataacgggctgcgcagtctggacattggggctaccgacatgactcatgcgacgttgggaaagttgctggttttgcatctgaacctgcgatcccatcgggggcatttggttttgcatctgggggggcgatcgagggtcacggtccttcatctgcatgctcgccatgcgcggcgaggctctggaaccctggggaatctggccggccatggaatcctggtggagggggtagaattgcccagacgcagctgcagtggccatcgcagcagcctgcgtcggcgagatgccgtaaccctgacccatgggcgtggggacaccatagctttggggaaaattcatttgttggtgaacacctccgggtccattctgtgcttgttggtaatgaggttgcgacggaacgataggagaggactgatggtttgagtgagattggatgggtgcctgggcgttggagggtgaggccatcgacccaacaggaggaccggcatttggtggcccggtttggtaaggaccagggatgtgagagggagcatgtggatgttgcccgtgggcctgttgatattggggagggtattccatactggcgagtgtgatagtggatcttgtcacacgccgattgagtggatcgatctgaaagtggcgactttatatggagagcaccaatcaaaccaaaggattgctttgtggtggtagctcaaaatatgtcaaaagttgatgacgacgtctgtttggtagatgtaataaaccgatatcgcaagagcgcgcaatgagggacaagagtcaacacaggtgctggggtagacggctgatgattcgacgaatagtctgcaggctcggggagtcgcgtcagcagagcgcatcgccgagaggtcactggattggcgggtgggggtatggatccaaaagaacacaacggaaccaagcacgtacctcaaaactgcccgcgcgttctgaacaacctatataatactgtgttttcgtaacagaagctctttggtcaacctcttgtcgagaataatcccgaactgcttgtggagggttttgactcttttgtgcaagattgttacgcccactgtcgggtgtaacgtggttgggctgtgatgcagcggtgccggggggtgcctcaactatatgtcggcttgatgcgttgtcaagtcagaacagccctggcgatgggcaggttggtgtggagactacgcagtatataccaagcacggtcggcaggctacctcattcacgcaactctgagactttctctgccacgtccagcgtagattcgggcggtgctaacagcctcgacctgcgacagataaggcttgggtgttggtgtcagaatgcgcctctcaggctccacgcacgaacactatgggctagaattagcattttaacatcctagccaatgatcgcgcaaagtcaatgaccaatgcgctgtcaatacagagttcaagtggaggggatttgggaatccggggcgggttagaccggtcagggctgagaggggagacatgtatgcgttggcaaggtggatgttgagctgcagctgggagcctacctggtcgatcgggttctgcagcgcagacaaagtgacgatttgagggtatagttaaaaactggccaaagccaaggaacgaatcactttgcgcgactatatgccatgtcagatgcaactgggtacccacgagggaagatgtaaatgatagggacgcgtgcagattggacaaaaagaaacatgaaacgcgatcgcgcgcataggtaaaatgagaggagccaatgagggaatagcaaggtagaattgcagtgttttggttaagcacgcgttgttttgacacgagataaccaaaagagcgcgcaacgtgggattggagcttagcgattaccttaataggcacgacagaaaggatagaaaggataatctccgggggttaaggtgactttccaatcccaggcaatcaagggatcccagggtagaagatgatttgaccagcggaggggagaggggggagatcgagggatcgtgccaacgagagagaaggcggtggttctgtgcgtaaccggagccactgatgtcaagccgggcagttccgcaagtatacaagtaccggcagtaaagcagtcaggcagcaaggcagtcaggcagtcaggcagtacaagcgcagcgttcaagcagtacaagatgtatatagggatacaattgtagttccaggtcaaatgggcaaaacaagtaaaatgggaatacaacagaaatccaagtgaattgtgacatgtgtttacccaaggcgaattgccagatgaaagatatcggattcaaacaaagaaaagcaatagcaataaagagagcaaaaagcatacaattgcagtactgttgtggtgtagtgattgcaagcagaattgtatacgacttaccccagtttgattggtatcaccaatagagaaggaatgaccgtatgcaaggcagggtttcaccaataatgatgtaaaaaggggggagatgatactgtgcgattggaggatgaactggagagggcgggcaaccaacgagaagaggcagagggaagaaaggcgaggaaaaagggcggatggggcagttttgtaggagattgactggctgccgactgagcgaccgccttgctccccgctgctgaggtagccttttctgcggtattacgctggattacgcataattaccggttattactggtgcattcctcctgtaaccgcctaaatggcccccaatggtatcagaatgaccatactgtaataaaacaaatccggtggtcccgagctctcgtcatgtgcaacccgagactatgacgcatgtatatgttgtcgttaactatcatctcttccttacaacatacaccataatctaatctttcgttcttaatcgacttttttagctcatataaccatctactgtatagcaatttactcaggctatcctttacatcttactctactaccctcgaaacccaatcctaaccatgaatcatacctttcggctgcatctgcatgtctgcccattcgcctcattttaataatcgcctcctttcttttttggccctttttcgtcagcttgcttcggctcatgataatcaattcgaatgcctaaaacgatgcgctcaatccttctttgctttttcctattcacggtggacaccgcgtacctcggccgtgtgccctattttgggcaagtctcctccacctaatgtcccattcctctatgacccttgcttcaaagcccgtgtacaatgtacaacatagtccgaaaaaagaagagctccacagaagaggggtttgtctagtacggtctacggagtactccgtattattcacggcacttatggttctgggagtgtgatgagatctcctaggaagcggcaatcagatcatctccccgggcggcaacattgcaatccaggcggaatgacggcattaattggcacacaagaccgtccgtctggcgcgaattggaaagatctagtttagtatcatgatgtagacgttcctgaaaacacgaggtctggctctctatctactcgcttggcgcattgagatgtttgttccagccgagctcatgacgcaattcaattaaccgggttcttatctacaatataggtatagagtacctgttatgcataatatacgagactgtttctatagcgcattattggcattattattgacatccagactggcggtcgaagtaattctgctcaccgtaggtttatcttcggctcaaatatccggacctcgtgttgctgtttcggatatatgttccatgaatcgcctccgtctcaattacaacaattcaaacagagaacatcatattcttatgtacctttctatactcccgatttaatccccacgtgcattctagtcagctttagtagcgtcccatggaccattcagcacaggcgataatcccgattcgcagggacagatgggtccgatctccggaccatgaaacacccacgtgtgagaagcttgaccgcttgacttcgaacttcaacggagtttctacttctagaaaagggttgcatgggtaaattatgttcatgtagtattgataaattcctcatttcgttcgctattttggctgcttggaccgatattcgtggccttggtaccatagcaacccgcattccttgaaatatatttatgcaaccatatgtgcggagtacatgcctggcactcgagacctttcctttctgttttacgccttgcagcttttttgatcttacagtaaaattgagcacaccctgatcagattattacataagctgattaattaaccttggaaaacggcggggtgacatgttaactatatcacgtgtagccattcccatttagatcgcccatcaaaaacagactggctcagtcaaagtgaccgttcgttctagctgtcttggatatacctcagtgaaaaaccactcagtagagctatttgatcgacttaccatttttccattttagcctatgctcctgagcatagccctcggaatccttcaaatgactatatattatcggccatgtcgcgatcatcaggagtctcgcttctcatttttcagtctttatcattccgatttgatctataagtatcctcttgccctggatctgaattgtgggactatgcttctcgctgtcgtattgttcaatggccttcattcaacaaactagggatagctcgtacgttgaggtggagttgcgacatcctgacggattctctactagttaagcatcagtacgatgcctacgttggattaagcaacaccggtttcttacacatttaagtttgaaaataggctaatgttcttcagccccaaacccattaatcattcgcttactaaatccgtgttgctgctatcctgagggaaacttccgcccggtggagcccctccgttgtgagcggctgagccgcaatacatctaaccggttcggtggagagcaatatccagggtcgcggatgccatggcgtcatcgaagcaagcgtcaatacctgcttagcatagacaacgaagatatataagaactatttgctttacttacctctcccatcttcaactcttcaactcctcaaatatctccctatcacaatactgctctcgactacgtcactttcaaatatttatatattaccacactcatagagaaactatcaccatgtcagactctaccttccacaccacaactcaggacatccgcaaggccgagtccaagcttgcccagtcacacgatggcaagcccccagcaaactccgacgtctctcaaaccaaggtgagttatctgtactgaattatcaccaagcataaagcagacctctgacacaatccatatagtccatcattgaccaaaacaccaacaagcccgcggaaatcgagaagaccaaggccaacctgcctctgcccgaccaacccccggttgccagtgactttaactcccttgaccagcgtaccactaatgtgggctctgggcgtttcgaataccctcctgataacagtggcttgcgcgagggtgcagctgctagcagcagcgcccgcattgatggaaaggagctgcacaagagcactgccccatgatttctagggttcgttatgtatgatagtcaaatttttatcaagcattatgaccaatagtttgaatattattattaccatgtgacgataatcgcggtaaaatcggccgattaatagtttacttggagagaaccatggagagaaccaatgaatagtgcaaattcagaagtggctatattttcggccgacagtgtctgaatgcgtcagctaaactacatgtgaggtcatacatgtaattaccaaattggtgttcaaattatagtaaaagttggcattcgaacatatcatttcatttcaagaacattgaacaagattagcgtagggcagacctgacaccacccagccgttgggaaaaacgacggtatgtcagccgaatggttgacgaatattccaataataacaggttaccaagtcattgtgtcaaacttccttgaaacgtcgccacattacttaaagtctggacattctagcctccacaattatagcatatttattggagcttaggactcgactgatttccgaaaacaagatgtgatatagcttttccaagttgatatagaattggggttatttcgatgtcatcatcataacgtcaacattgggtacaagagccaaggagtttgtatacaaagccgacaatgaattcttatacagagaactgtaatccttttttctctatccaactgaagtaacacaatggcctccaacactcaaaaaacttacaaactctccactggtgctcagatccctgccattggcctgggaacctggcaagatgaggcagcccaggaggcatcagtccttgtagccctccagacaggatatcgccatatcgatacggcaagatggtaagttcctcaacaatttgacacgcataactagtctgacccctatagctatggcactgaggctgctgtcggcaaagccatccagaaaagcggcataaatagaagcgagatttttgttaccagcaaactgtggaacaacaagcaccatcctgatgatgttgctcaggcactgcaggatagcttggatgatctgggtttggaatacctcgacctatttctgatgcactggccttgtgccttcaaacgaggagatgatccattcccctctgacaaagatgggaagctgataactgcagatatcgactacgttgatgtacgtgctactttaaaccaatggcaaggctatctactaacaaatcaaagacttacaaagcgatggaagatctcgtcaaatccggcaaagccaaagctatcggggtttgtaacttctctcggaaggaaatcgagcgtcttattgcgaacgcgacgatcaaaccggcggtgcaccagatggagctgcatccctggctccagcaaagtgatttctatgacttccaccgcacgcatggcattcacgtaacgcagtattcccccttcggcgaccagaatcaaatctatggtgcccaagagaaatatggtcagcttattaatgatgagaccttggtcgagatcgggaagaagtacggaaagacgtcggcccaagtcgccctaggtattttgcccctgctcgcccggttcagaaatacagagctaataacttttcatagtttggggtatcgaacatggccgttccgtcattccgaaatcaaagcatccagaacggatcagacaaaactttgatatcaatttcgaattgaaacctgaagatcttaaaaagatcagctcgatcgacaggaagctccggttcaatgactcaagcaaagacttcggttacgaactcttcactgatcttgatggaaagcagaagtgaagtaagtgtgatttagagattacggtctttggaaacactggctgaagattgcctatggaggtgtcggtgttgatgcctgaagatgcgtgaatgttgctggcagaaaatatgaattattataacagaggacatacatcctataatctcttcaaggccgtcattaatgacttaagaaatgggttctaaatgtgaagctattcgtacctacatatacaaatcgggattggggcataatagacggccaggtgtattaaaagcatcaaggatggatggtgaaggttacgtagccagtaaatcaaaatacgcaacagtacggagtacaagataacatatattgaagtccggagcatagtactttgggccagaagcaatcgattattaggtcgctggattagattcacctagttagcaaattaaccgtcatccagtatgtgatccacacattgagccaaacgtccattaagggcgggaatcggcaatattaacccttcttgggtgtgttgtccattacatagacctccggaacaatctgtttctttttgaaatcaagggtttcaaaaaggtcgcagagcttctcagtgagagtttctgagaagttccttagtcagaaaagaaccataggtaactaaagtggattcgtggagatcttactttgtcgtgtcgccttgtgtattttgatatagttctcagcttcctcgttgttcgcgtgttgcggtatatatggatatctgtaaaacgaggcgcgttagtcgtaactatcaaaccagcattagtggaaatcatacttgcgacgaatccacatggcacacaagaaaatgagagctatagttagaggaatgccgaggccaagagatagcccaagagcaagcccccggtttatagctggtggactgtcgtggaaaccattttcaacccttatagaaagggcttggtactttgcattcatcgtattgacctctgcggtgagggcatcatgaaacttgccagacagaacctcaagcgctccttcccaatgactgatttttgcaatatcctcgtcgatcttcacagaaagagcggtaatatcctcgcgcatacgactgttctctttgttaaaatcatcaaacctcctagaaagagattggaaatctgcgctcgatccatcagtttgtgaattgttgccttggtttgtccttgcattgatagtgttgatttcattttccaatctctggcaccacgaccacagcgtgagaatattgtcgtcggtcgtgtaagaggagaacaccccacccatgttgtagtagacgcgggaatcaaaaatcggcgcagaaagatgaatttagtaaagaaggaggggcaagcaccttggtgaaatcatgcataaccgtttgattgccataagagaaaacttagaagaatatgacccgggactcttcataactctatttccgtccacgtatgagcggaaggtgtttgagatattatatacgctgtggttgggtcaagcttagtacaatgaacacaacaaccactgagcaagaaggtattagcatagatacccaacatagacggaaaaatatcttccacactgtggacttctcgtggatcgtaaggatataatgtaggataccacccgcgtaacgctcataatgaggtaagacatattggtaaccatccatgatctcttgggcattcctttggccaagtacatcttctatcaatcccttcacaacgaaaataaaatggctgcaggtcgatcttacccagccgaacatcatggtaggcataggggtagtttccccgaggatatatacctcgaccaattgagacgcatcgacatcaagggaaggagcaccttccttacgtgaaagatcttgaacttgatcgttccgaacgttcaaagcatgatcctcaaccggcaaacaatctatccgaggacttactattcgaaatcgacgccaataacttcaaacacgatttactcgaccctagcgtcgaccttctttcgtttatcctcgttcgatatcgaagaaaatcttctgttgaccagaatggcaactccagggcatagcgcagcggtcgagatatttgcttccaaattgatggtgaaattggctatcatggaacgagagaccgctatccaagggttcccaggagtaacgatcacagtcggcaatagagggaaacaacatgactatggatggggcccactccaccggcctggctatggccgtaagcgatggtcgttcttgaagttgcggtgtcggagtctaaagccaagctagagcgcgacgtggagttttggttagatccggccagaggaaacgctaacatagcgttaacgctagaagccgccagaaaaaagccggtcattgacaagacattccggtttagattctccgttgatcattccgtttgagatcctgatgcgacgaccaagctcctctcggaaaccaatgttagcatcggcatgcaagacctcaagggcattgtggaagggatctgggctgcccaagatttccgaaggggcgtatatacggtgtacctatgtccaggtactccgtaccttgtcgcctccacctgtgcacatgtctgaaacgcttactcagcaccacccactccccgggcccggacacaagtggctcttccacatgttgactccgaccacaattgcattttgttttgctttgtgcctcgagaaaaccgactctgtggctggtttttctcggtggcctactgctaatcctgcaatatccaggcttccccgcgcatcaataacccccccacaaaaaagcaccacggacgcgcaacatcaacattggaccgatacatgacgtctttgttgacacctacgattgcaacctcgctacgaagcactctcaaacgatcacgaacagcctagctacagccacctccgcgataattaccctgggactgaccttcaagctgcgctcctcgcggagttcgcgcatcagtatacccctgtcaccacttgaatcctactctaggactccggcttttataaacgttcattattgacgaatacctcccgtgcatgggttagagagcaaagatggctccaggcggcggtggaaatattaaggtggtggtgcgggtgcggccgttcaacagccgaggtgagtaaatatcgagggatggattcgtttttgagcctcaagctaaccagtctgtcattgtgcagagatcgagcgaggtgcaaaatgtatcgtgtcgatgaaaggcaaccagaccgtgctcactcctccacccggcgcagaggacaaatcacggaagggtgggaaaggtgttagtgaagggaacaaggtctttgcctttgaccgatcatattggtcctttgataagaaatcatcaaacttcgccgaccagaatgacctcttcgacgatctgggttctccgcttctggacaatgcttttgggggttacaacaattgtatcttcgcgtatggccagactggttcgggaaaatcgtactccatgatgggttacggcaaagaatatggtgtgattccacggatttgccgatcgatgttcgagcgcattactgctatccaggcggacaagtctttgaattgcactgtcgaagtgtcatatctcgaaatttacaacgagcgagtacgcgacttgctcaacccgtcgaacaaaggcaacctgaaagtccgtgagcatccgtcaacgggtccttatgttgaggatctggccaaactcgtcgtcggatgtttcgaagaaatcgagagcctgatggacgagggtaacaaagcccgaacggttgccgcgaccaacatgaacgaaacctcaagtcgatcacatgcggtttttaccttgactctgacgcagaagagacacgacaaagagacttcaatggataccgagaaggtgtcgaaaatcagtttggttgatttggctggttcagaaagagctaactcgactggagccaccggcgcgcgattaaaggagggtgcggaaatcaatcgctcattgtcaacacttggtcgtgtcattgctgcactcgctgatgtctctgccggcaagactactgccggcaagaagaagaatgcatccatggtaccatatcgtgattcaattctcacatggttgctgaaggattctctgggcggaaattccatgacttccatgattgcggcaatttctcctgcagatatcaactttgacgaaactcttggtactctgcgatacgctgactcggcgaaacgaatcaagaaccatgctgttgtgaacgaagatcctaatgcacgcatgattcgcgaactaaaggaggaattagcacagctccgatcaaaacttggagggggagtagcaccgggaggagcagctggcgcaataggaggtggtgtcccgcaggagtactaccccccagataccccgttagagaaacagatggtgtctatccaacagccggatggaactgtcactcaagtcagtaaggcagagattgtagaacaactcaatcagagtgagaagctctacaaagatctcaaccagacttgggaagagaagctgcaaaatacggagcttatccacaaggagcgtgaagcagctttggaggaattaggaatcaacatcgaaaagggcttcattggaatgagcacaccaaagaaaatgccccatttggtcaacctcagcgacgatcccctacttgcagaatgtttggtctacaatatcaaacctgggactaccacggtcggccatatggatcaaggtcaaaccgtcgagattagattgaatggatccaagatccttgagaagcactgcactttcgagaatgtggacaacgttgtgaccattatacccgccgaaggcgctgctatcatggtgaacggcctgcgggttgacaagcccacacgactgaagagtggtttccgaatcatccttggcgattttcatattttccgtttcaaccatcctcaagaggctagagccgaacgggtcgagcagagcttactccgccattcagtcacaacaagccagctcgggtcgccggccccaaacaaaacccatgatcgaaatctgagcaaggcaggatctgacttggatggcgattcatctagggcggattcacccatgccccaacagcgtagtcgtgagtcagactggttcttagcacgcagagaagctatcagtgctatggttggacctgatcagatctccaatttgcctgatgatgaactggatacactgttggaagatgtgcagaaggttcgagctgaacgacgtggactgccggaagaagacgattccgactccatcagctccttcccaactagggacaagtatatgtccaacgggaccctcgacaacttttccttagatactgctataactatgccaagcacgccccgacagaatgacgacgatgaagtcaatggcgttgcatcatttaaccaaactcgacaagatatgcagcggcagttggatcgtcgcaaggaagagttccaagaaaaactcaagaccgtgggagcttcgtctgatccagaatcgccggagctacgcaccgagaaggagcgaatggaggacgctctgcggacggttaaagaggaattcgaagagcaactgcgcaaacaaaaggagtcttttgaaacccacatccgagatatgggtaagccagtacctcaaatcttcgaaaatggcttcgccaagttagatgaacgtgaacttgaaatcgcgcgttcagtatacagccactggtcccagcgaaattatgtccgaatggctgagaagattttacaacatgcctgccttctgaaggaggcacagatcatgagtcatatcatggacaagcatgtggtcttccagttcgccattgtcgaccatggccacaacatggaatcgtcctatgatctcgtgctcaacggaatctccggcgatgaagacatcctgcttgatgaggccaagaaaccctgtgtgggtgttcgagtcatcgacttcaagcagtgcgtaattcacttgtggtcaattgaaaaactccaacgccgcgtccaagccatgcggcaattgcaccaatacatcgaccgccctgactacattcaacacttcaaactcgacaatccattctctgaaccttgctcaccccagtattctcttatcggtgatgccgacatccccttaaccgctgttttcgaaactcgcgtgcaagacttctccgttgagataacctcaccatatactcagagtgtcgtcggaatcattcgtctctctctcgaaccatcctccgcgcaggcgccctcttcaaccctgaaatttaacgttgtcatgcgggacatggtcgggttcgcagagtgggaagggactgatgtacatgcgcagttatttgttccgggtatctcagaggaaggaggcgcaactacaactcaaatgatcaaaggatttgaggacggtcccgttcgatttgaaagtgtgcacagtatgagcttgccgctgtcaagtccacggacagccgcattgaaggtctgcgtttatgcagctgtgacatcggttcatctcgacaagcttcttagttgggatgatatgcgtgactcagtggagccttcaccgcaaaagcggactgctgctcggatcgcggaatcagaattttactcagaagaacgtcatgacgtctttgcgagaattcagattctcgaaatgtcagaatctggcgagtacctccccgtggaggttgtccaaagcagcagtattgatgccgggacatcccagcttcatcaaggattgcagcgccgcatctcagtcaacatcacgtacagttcaacagaaactcttccatgggatgatatcaacaacatccgcgttggttctgtccacctcctggatccttggggcaagatcccagatcaggatttccagactccagacgtccccttgaagtttgtccaagaaccaacggtcaaagaaaatgccgacggaacctctcatgtcacaattgtcggccagtgggactcgagtttacatggctctctgttgcttgaccgagtgacagcagaaaagtacagggtccaagtaactgtccgttgggatcttgtatccagtcgtttacagaacccagttgtgttcgaggcagagcaaaccattcaaatccaaggccgtacccatgtccgccaacagtcgatgttcaagcaattctggaactcgattcgtgttgtgcactcgacgacttgcatgtactccttggttattcggcctatttcagctaagcgtgctgctgatctgtggcgtatgaacacacaaaatgactatgtgaaaggcgaggagctcttgaacacctgggcgcctagaaaagtttctctggtacgagactacattgccaaccgcaaacgccggcagcggctggcagagcttcacgcagcccgaggtgctctgagcgcgggctgtctcattccatcgctggctcgtggtgggaggtcaactccgatgcggggtgcagatctcaatgagcgaaaatccaaaattctacggaagtatcttgatctgtggtcgctcaagcaggacccaacagaggcaatcctcatccggagtaataccgaacccccttcggacggagcggcacacattaaaaattcggatgccagcggcctttatgataaactttctctcaaacctcgcttcacagccaccatccaaacccttcccaaagcccccgacgccttaaaaacggggtacgtgcttacgcccgatgataccaacaacgtttgggtgcgtcgtttcttggagctccgccggccgtacctccacatctactcggtcccagagggagacgagattaacgccatcaacctccgcaatgcgcgtgtcgaccatgcgcccgacttcgcaagactactcgacggttcaggagctggatccgaccgttcgctgtctgccaagggacgaccgaatgtgttcgcagtctatggaacccagaacacgttcctcttcgccactagaaccgaggcacaaaaggtagaatggatcttgaagatagacgagagctacttcaacagcaacagccccagaccccccgccaatggcgaccattaaaattttattgcggttgccaactgttgtgcgcggacatgtccgtggacaagcttcagctttgcttcccctgcttcgtgtttcattattacgggtctaagtctacctttacctttacctcctactttattctttcgtttgcccatttcctttcatgacctgttgagataccccttgcatatatcgactcgctatggcactctcgctcttatgtacataataatcctatctggatcatatattcgattgtgcacagtttgtttcattttggaaaagatcttttatgcagtttgacctgcatttctatttggtagacaagaacgatataaatatattttgcgatcgagatagagcctactggtctacctgtgcccattacctattaaattcaatcagaatatgtctatgaaccctcagcatgtagcccacaggacacacaggaccgttgccatggaaacaatcagagcacaaatgacatcaacccacaaaataactaccaagtcttcatctcttctaggctgagaactcatatggaaattgaagcttaaacattcgaatgggcaaaagtgaaattgttcgagaaagaatgttctcccaacgcccttcattccgctacctggctatcggcgcagtggtgtctctgtttgtccttgcattccttgtcctcggcacaggtgcaccctcgctctcatcacaatttaatctaaagacacaatcacgacagcaatactgtgcacctaccgtgaactcttccgctggctgggagtttgttgttgagcgcgatggaaacaaccacggtctctctgaggaccagtgccgcattgctttcccaaagctgtttgttgagattgacaagtcatctaaagtgaaagaagataagcttgtttcctataaggagctcaattccaggacagtggatgatggtatggtacggggaataattgatcgaggagaggtgagtgaaatattgacccttgtggacttgagagcatctgattctaatatatggtattcagttatatattgtcgactacgcccccatgcctgttacagcatctcgagcacgcgccacattgaactccctccaccgcgccctgacagcattcccagaccgccacctcctacccagcgtcgagttcatcttcaccacagaagacttcgcagaagacacaaccgccccaagtcccatctgggcctactcaaagcgtgactcagacacctcagtctggctaatgcccgacttcggttactgggcttggccagaggtacagattgggccgtaccatgaagtgcgccgtcgcattgccgcaatcgacgacggccagactgccgcagatggcacatatattccgggcctgcagttccaggagaagaaaaagcagctcgtatggcgcggcagtctggcgacgaacccgcccgtccggagcaaactcctcaagtctgcgttgggacgtagttgggctagtgtgcgtgttattgactgggatgatcaaaatgatatccgctttaatcttctgcccattgaagaccactgtcggtacatgttcctcgcacacacagagggccggagcttctctgggcgtgggaagtatcttctgaactgccgttctgtggtcatctcacatgcgcttgaatggcgcgaggctcatcatgcggcgctggtatcaactggcccggatgcaaattatattgaggttgaccgggattggtctgatctatcgcccaagatcgattatctcattgataaccctgcgattgcggagcgtatcgctaataatgcggtgcgcactttccgcgatcggtaccttactcctgctgccgagtcgtgctactggcgtcagttgatccggcagtactctgcagcttgtgatttcgagccggtcttgttttcgactggccgggatggaaagactcagccccggggtgttccgtatgatacttggcttcttatgcattgatgatctttgaatcggttgctattgattgtgtttttattgcatatcggtgtttttctttttgcgatattcccggttggcgttgaccctgatacagtttcaatttgttttgtacatgagatatattgattatttatgactgaatataatgcaaactagaatgcaatttttattatatgaaaacaagtatttcctggtttatattcgggggagtctagtagtaagtatacctttgccaagccttgatgccaagacctacatgaccgcaatattcttggcacgtgctcctgcttacctacgcaatcgccaagacctcgggattcgaaataaacatccgctgatccatggatcggtcaccttgtcacgttttcggtgactttatgtcgatttctctgatgatcaaaatacggtagatgatcatgcatcttttttttttgccggattttatattgcctgatatcaagtttagcctgggctaaccccagctacacctattacagcggtgatggatttccccgcatttgcacctgtgcctgtggctgacatcttcaacattcttgtcttcattcggcgacgaactttagccgcctaaagggtctggctgtaagtctcttagcttggatcactgataaaccaaattttaggctggttgaatgatacatggatttaattgaggtgatggactaccgctaagacttggtaggaaaggaatcatggtccgtggatgattggtgcaattgtgactgctgaagtacgggataaatggctcgctggctaaattgaaccaagacattcaggatatgaaactgtttggaaacacgccccacatcctcctgtgaatataaaagctcttctcctgaagggattctctgccataaaataacatatctcaattcattcgtcttcttcaattatcaacaatatccgacccttcattatggtctctttctcaagcctctttgtggctgcttgtgctgccgtaactgcctttgcgcttcccagtgagctggaaaagcgagcgatcaccacgagcgagcaaggaactagcaatggctacttctactctttctggaccaatggaggtggcagtgtctcctataccaacggtgcttcgggccaatacagcgttagctggaccaactgcggatctttcacctctggcaaaggctgggctactggcagctctcggtaagtcgagtccacctagttttctattgtccacatacttacagtacaccatgttagaaacatcaacttttccggttctttcaatccctccggaaatgcttatctcgctgtctacgggtggaccactagccccctcgtcgaatattacatcctggaaagctatggcacctacaacccagctagcagcatgaccttcaagggaactgtgaccagcgatggatcagtctacgatatctatacacaccagcaggtgaatcagccttctatctcggggactgcgacgttcaaccagtattggtccatccgccggactaaacgcaccagcggaacagtcactactgcaaatcacttcaatgcttgggcttctcttggattgagtctcggctcgcataactaccagattgtcagcactgagggataccagagcagtggatcgtcgtccatcaccgtttcataagcgcgtgaaagccctgcagtggcttcatgcgaaatgttcacttgctttggcaaatctttattggaagggctattcgatgggcctgttaagtctcattgtagtaaggaggtggaacgatactttgcttaggggaacacggacactttattgtctttaggcttatacttgtctatatataggcactcttggttaatatgacggtgcttttagcataactaacaaggcccacaagtcggccactttgaatacttcaacttctctttactttctctttcttcttccttctgtgatatttgtaggaaagtatggcattggtattgcctttacgttcttccttccgtccttgcctacatatgtctgttgttagcacaacacgcagtctaagagaaggaaaaagaggaacatacctgtagaggaggtagacaacaagcataaaaagaacagcggtaatacaatctggaatatcggctgctgccgctgtcttccagtcagacggggggtagttgatttttgtcttcgcgaggaatcaatgtatttcttctcttccgaatatcctgtaattggctttgtcggcctcgctcaaggaggtcactgtttctctcttccgtttcttgggcacctccggtattcccgtagacactgtcctctgcgggatcgaaaataggataggcttgtcacgctggattcctaggatcgaatcgatgtccaaaatggtatcatctcctaggcatttgtttgcggtgaagtcataggactgtttcttcccgataggttcaaggtagagggtgaaattatgctttacccgtgtccccactgagagattgcgtgccgtggaccatcagtatttggcgccatcgggttgacaggctgagatcactcggccaacttgaggttttctggaaaggtagagtgagtacaagccccagggtaggcgaaaacttcggcggggaccccacaagtccccaagcttctcaccttcctatatattgaggcttactgtgcgtaagtagacgagaagagggagagttgagatgtagtctaacgaggggtgagtacttgaggcacctagatggcgtcctgagaccacaaaatccaactgacgggtgcccaatcaaagggatagagagagaaagagagaggatttttttctgcaaacaaacagagaactacttatgtagctagatgaagcttatcaaacaggacaaacatggcaggctatttaacagatactaagctctctccactttctctcttccttctcctccctgtccactctcactctgacgagttgaagcaccttttttctctctatatatatgatcaccatcgtatttaggctctatctacttctcagcctccatctacccacggtctatatgcctgccctcctcccactttctttcttcttcacggcactcgaaattcattgcacatcgtgcttctctaatgagcacattcagcggcgacgagatcggcgtttaggaaaggttctaacataacataagccagacaacaagtgccgtgttcggctcgcaaggctataacattgcatttatagactataaatgctctggaaacataaccatgacgctgtaattatggataggcaggcaactatcaattttgttagtgggtttaaggctcctggactctgatgcatgacttgacggatttgattgacaatgcctggaagaccggagttcagaattgcaatcggacgattcgcatgttatatgaaagatctcaatgtcaagtatgggttcgtttccacgtacgaaaaagccgtcttgcgcgtcttctttcatcgacaattaagcaaaaatcccagggtgccgaaccgcctatcgcaccttcccgttttgaggttcagatcttgatacgccccgattcccacatatatcaccgaaattgttcctattctaggaccataccatttagcgtcgattacagcgcatttgaatgatggactacacgactgcctggaggcagaaaggcaatgatccgcgatgcctagtcttgaattcgacggggacatgatacggaagcgatccaagttctgctttctctgatgacggaactgataattcgcccgttggacccaccactgagaactacgttcaggctacatcctcatgcgcaatggaggcggagggtatcaagcggctggcaaagcgtttgctttgcgacatgcttgggctcatcaaaagatgtgccaatcttgacgatatggaggaaatcaatcaccttcgcctcaccggaaaaatccgttggtccgaaatgttcgaaaaggaggacgggttcatctatgaatagactgggaacatgggcgaaaagctgtgtcacagagtaagcctacccaaagcgtgggaatgctggctcagccgagacggtctcggtgatggttgtgatctgggtatctctcaacacgatgagtatgagagtacctaagagcgaagttgtattcgaatctttgcttgttcccaagtggtccatcattggtttttctctggtgcttgcggattgttatgttgagtgtagccgccttggaaccaacctctataattcagtctttcatgtattcaatccaaattgactcgtactcgtacaagtagcctcggttgtctctttctagttggttctagtgcttggtgcttatatttgaatgtgataatggcaaacctacttgaaatatatatcatatccatcagagaccatcacgtacgtacataaaacatcatttagaagatactatgctctatgaacatgctctagtcagctcttcgcgcttcacaacaataatatgagaatatatataatgtcgaacttacaaattcttgtattatttttatatcccctttaagggcctcttgcgatgcactaggcacattattcaacccccgtgccctttgacctccacttatgtacacatcttgtgcgcacattacataatttatattcccaagatcgtgtagtgacaacggagactcattccagctggctatgtccgaccggtgttctccgcgcgtggaatggtttcgatcatggaagttgggcgtgacaccggaggagctagaaggggactgcttgctgtctggcttggtagatatgatagatcggaatggaggtagggatccgacgatgatagctgtcttgattggtattaggattctatagtagatgtcgagcggccaacttacagattgacgattcaaccacactccatactgcaagtgctgcttggtccgaatatgcttttccggtgatagcaaccgctcggataattgccgctgcgataactatgatcccaagacagaacactatccctaacccgatcttttgttgcatattgatctttccatgccagatgattcgaagagggagtgacatgactgtttaatggtattaaatcaagaattgacacgaaagtagatggggtctttgtactcaacaagtccgtaaggatatcgactgcggtgctatatgatatggagataacagatcctctctgatcaattggctttgagcatttccctaccaattgttagacatagaggctgaaggttttaagaaacgggttgtctaccgaacttgaagtaattagatggcgggtgacaagtgtacaccgacccaatccaacatccgatatatgccaaggctgcgaacacaacggtggcccaccagacccgccggtaccgaggcaacccattggatatcatccagaagagtgctaggaatgaggcttttacgctccatagcacggaccagaatattccaatgatcgcaaactcgtagtgggtgtagcgaagtccgtggtcgacaatatctggcccggtcatattgaacactatataatagatgtgtggagcctgcagagtctgtaatactgcgttcgttatcaaaaaagccaaggcaagcagcatgaaatagtcatccgctagtagacgcttcacatacacgattcggatcgcgatacgagcagacgtaaacaggatgcttactcctgttcccgtccaagtgatagcaatgaggccggtcattgagagttcagttcccatcccttggggagtgggaagaatctccatagtcatgacgcagcactgtatgtagactttttgcctagtaagtgacaacagacaggacgctcaaattcgattcatggcgaataggtcatgagggggtaagctcataaggtaatctttccactcatttgtttgtgcacaagctagctgggaaggactgtgataggctacaattacttggtttgtaatttaccgttgcgcaaaagaaaagaccagggaaccctgccaatggtgaaatcgacccaaagagggggtaaaacgagggtaacacagattagatgaaacgaattatgtcgagtctgcatggtaatcctccgtataactgcacccatgatgttagtaggacaccccgaataccccgagaaactatttataaccctcacttttggatgaatcgagattttgcctgtgaatgaaggtgattgcttgtttattgggtcatcagtggcccagggcggcgacatccaaagcgctgagatatgcagcccggatttaaattgagcgacctctcaacccctgtcgttgtattcgaaattttcgttttgtccattagaaaagagactccacaaacagagtgactctgcagcgtttttttttttttcgctattagactttttaggaatcctagaataggtgttatacctgataggccgttcctcgagccctttaagttagccgccgacaattgagacctatatccgtgatctgaaagttgttgtgattgtccagcttttttgataatcacaaaaagtacacctaagatgactcgacgcagggaaactcgcgtttgtcatgcaggttaccgggtagccttccacatgacaccccaggaaaatgttcctgtatggttagaaagagatcatgtctaccgtagataccttcctaagtccaacatccaagtctacttttttagcaagtctagcgatggtaccaaagctaatctcgttgttgcaattcgctggtttaacgtatgcggcctttcaggcttcatgcaaatgcgtaagcgaaaaacaacacgaaaaacatcgacttagattaactcactatctagaccccaggagatccatgttggccctcattgagaatatgggaatccctcaatacaacagtatctggaaagctggtccgcaatctcccagtcgctatctcatgttaccccggcacctacgaagacgaggatgaatgcgcgtatgtgtattcgcaatggtcgaattccactttccaacaactttcccccgtcggttactttggtcctacagaagatgcttgccctccgattgacatgcgccatcaatcacctcgcacatgtacgcttggtccagctccagtgtataccatcaatgcaacagagcctgaggaggtagtagctggtatcaaattcgcacaggagaatcatgttcgcctcgtcattaggaatacagggcacgatatgttggggaagttagtaacacacgatgattcaacaaaggtactattctgactaatcacttcgttgtagatctgaaggctatggaggactacagatttggatcaagtacattcgaaagggaatatctttccaacaaaggtatactccatcgaatggatgtaggagaagcaattgggctggctctgcaatcattattggcggaggctatgtttggcgagatgtatacaaagttgcctttcagcgcaatctcacggttgttggcgggggagacccggttggtgaaattcttcccccaacaaaaagcaaagttctgattttgttccaaagaccgttggttgcattggaggttacacacagggtggaggacactcgccagccagtcatgactacgggcttgccgcagaccaagtactagaggcccaagttgtattggcaaatggcgatatcgtcacagcgaatccttgtcagttttcggatctgtactacgctattcgaggtggaggtggtggtacttacggcgtcgtcacgtcgatggctgtcaaagtatatcccagcaagcctgttgtcgcacagtcgctcgaaatcactccactcgccaacgacacggactcactcttagacgcgattaccgatatctaccagcaatatcccaatatcatggatgcaggattctccggctatggatcctggtctattaacagccctatgatgaaccaaacacctggctatatgcatgttgttgcggccatgaacaagtcccttgtccagtctttggaagttttcgatacacttttccagacattgcagaagtataacggtacactccttcgtatatcagttatatggtatgagttcccaacgtatggggcatacttccactccctctctggtatatcccagccagtgagggctgggtctcccaactcggctatgacatcacagatgtttagcaaagctgccttgacgactagtcgcccttcacttcgcaacatgattggtgtcactgcgggaaattctgaagagtgtgcattggctaatgttgagctcgtcgggggtggaaaggttctcactggagcatctgacaagtactccagtgtgaatcctgcctggcgatctacctatattgtcagcgtcgtggctagatcttgggtgaattactcatctgctcaaactgtcgaacatgatatcactcatatcaagggagctgctatgagagcgctcgatccattccttggaagctacatgaacgaggcatgaatattcttcttttgcggcgaattaacaactttactgactgtaagaaaggctgatcgcaatgatcccctatgggcgacggatttctatggtacaaactacgtgttgttagcgcgaatcaagaaaaagtacgatccgacgagtctattctactgccagacctgtgtgggtagctcatcttgggctcagcgatatcttgatggagcaaattacggccctctttgttccactgggctgtgatgcttgatattgaatgagacggcattaaaaatccgcttgaaaccttgccactgtctgatcagcatagtcacttttaatagtctagcggcaatagacatcgaggttaccatggatatgttcttgaacatagggataatctccatatttcccttaaatgacaccaagtcagtccagtaccgtttgcctaatgagtgctatggagctgtatggattttgtaagaaacgactccatagatcgttggtaccttccaggtcacttccagtttgctatttgcttccttcctttgttcatttatttgttctttcctttccagggttgtttgcactcgagctaagcgagacgttcgagttttgcatcgtttgcaataaaaccagctatataaacaggccgattcccacttctgtacttacttcttctctctcttcatcatattggatgaacccaaccacatcccacatcccacatcgtgttcatcatccatcacatgacttgtctgttcttactttcatccttcagccaacccaaccacattgtccttctatcttctaccttctaccttcttccatcatccatcatccaccatctatcgtccatcttccactttatgaggtttgtttctcatctgtgttatcacctactcttcatcatccatcatcgtggtctataatacctgatgacatggggctgactgtactagatatgtgtgctcacatccactcatccacttcatgcatccacttcaatcaaccatcgacattcggcattcgactactgcgatgcttcgaccttaaaagaggaggaatgaaaagaaacggtcttgaacgacagagtctccgcaggagtgtctctgaaggagacttctcgtcgggaagaggttacagcgtgtacccatttaaaggagactctcaagaccgtttgctgtggtggtataaaaaaatggtcgcctcgacaagcatgcatcgacatccaagaaccacatccaagaaccacttcaatccatccacttcaatccatccacttcatccatccacttcatccatccacttcatccatccacttcaatcaaccatcgacattcggcattcgactactgcgatgcttcgaccttaaaagaggaggaatgaaaagaaacggtcttgaacgacagagtctccgcaggagtgtctctgaaggagacttctcgtcgggaagaggttacagcgtgtacccaattaaaggagactctcaagaccgtttgctgtggtggtgaaagtatggtcgcctcgacaagcaaacattcacattcaagtgtcgatttccaaattccacttcaaccatttacttcaatcaaccacattcaatcgaccacgttcaaacatctacttcaagcaaccacattcaatcaaccacattcaatcaaccacattcaatcaaccacattcaatcgaccacgttcaaacatctacttcaagcatctacttcaatcaactacttcaaacaaccaatttcaatcaaccacgttcaatccttcaatgaaccatatccaagctccacttcaatcaactatccaaattccacttcaaccatattcaaacatccacttcaagcatctatttcaatcaaccacattcaatcagcccaattcaagcagcaacttctatcaaccacttcaagatcctacattcaaagcatccgcattcaaacttcagtcaaccacttctatcattcacattcagccttactgtgatgggtttcggcttcaggaccatttgcaggcttgcaacaacagcaaagacgaaaggaaaagagaaaagaaaagaaaaccaaaagaaaacatctcgaatgatttcaatcagctacttcaggatcctgtatcccaacaaccacttcaatcaacaatccacattcaaccatctacaatgcttcgacctttaagaagaggaatgaaaagaaacggacttgaacgataacagtctccgaaggagtgtctctgaaggcaacttctcgtcggggagagggtacagtgtgtacccatccaaagcttcagggcaattggcaggcttgcaacaacaatacaaaaacagaaaagaaagaagaaagaaaatacctcgaatgatttcaatcaactgcttcaagatcctgcatcctaaaaaccacttcaatcagaaatcaacattaaaccatatctacaatgcttcgaccttgaagaggagaatgaaaaggaacggtcttgaaccacaagagtctcggaaggagtgtctctgaaggagacttctcgtccggaagaggttacagcatgttcatttaaaggagactttcaattgattcatttattgattctacctgagtttaattcttagctgtggtttatgcctatagaaaagactatgtatatatgctacacaataggctgctacaaggaatgttacgaatggagccattatctcttggcttcagttcctcagaatgttactcttcgaaaaaaaccgtagatccgatctccagatattattatggcctagtttagactgtccgacgtctcgtgtccaccggaatgagggagtcatgtgggaaattccacgccatgcttagacgaagcaactgaactcccaatatttttctttctccacccgaaggagtttagtgcagatagcagattacagcgaacagcatcaaaatcgccctggaatgaagcgaatgtaactaaaataccaggaccttctccgtaggaccggagaattgtggatttcaagggtgttgcgtaaagccctcgctcttgcaagaaaggatcggcggacgcgcggtgttgttgggcatggtccgtgccctctacgcctgaggcatcaatataaacttgatcccaccgccgaggccgaccttcagatcgatctttcgtatctccaacaacaattattgagtgaaccatacaaaacccacaacgatcaagatgacctcagcacctagagatgcactggagtttccagattcagataggggcttcttagagcctcatctacctcctcgggatggctcggcacctgagtctgatctccccttcacaacactcacattcgcgacctcgcttgacgcttctctagctctgtcccctggtgcacgtacagttctttctggaccccaatccaaggcaatgactcattatctgcgatctcgccatgacggaattatcattggcgttggtacagcagtggcagacgatcccggtctcaactgtcgaatcacaggagttgggggttatggcaagcccggcctagatggccagcctagaccagttgtgattgatccgacagcccgatgggacttttcagacgacagcaagctgttccaactttgcagagaggggcgtggccttgcaccatggatcatcaccgcagttgagaaaccaaacgccaagaaacaagcattactggaaaaatacggcggaagatttatcccagtcaaaatgcttagaacccacaccggccgacatcaggttgactggccagatttgctcgtcaccttgaaatcgaacggtctcaacagcgtgatggtagagggtggtggccaggtcatcaaatcccttttgtgcccgctttacatgtctttgctggacagcgtcattgttactattgctcccacgtggttgggtgaaggtggcgtggtcgtctcccctgataggcgctttgacgaggatggaaatgcgatctccgcagcgagattgaagaatgtcaaatggtacccatttggggaagatgtcgttctttgtgggcagatcaagctctatgactgagagagaacatcttggatctttttaccttttaaaattgatcaaccctcaagtgcatgttccttcgatctgaggattccagcccagacttcgatatgttttgtctcgtggccttactgtggcaacttgtcaataaaacattacactatttcatctgctaggtcatgtttcccactccaccggcgtacagtttatcccaaactttccgttgaccccatttgtccaccacgagccaattggaaggcctgtacgtatgtatcaaaaatatgtcatgtcgtgcgttttgtccctaggcattgagggaagacttccgtatgaagaataaggaacatacttctactttactgtgggaatccacttgggaacaccggatcaaatatcttcaaatcaacactcaacgctagtcgcagcattatatattgaggactatcgtagttgcttgaactcaattcgaataatatttctgacataacagaagacattaaaaatagccttgtgtcattcatttctttctttatctgcaataatggtctttgttttcggaggatttaattctgaactaataggaaccaaaaacaattaaatagccccgatgtccacatcatcgggactccatcagggcggacctcttgatcagtgctcggagcctggaattcatcgaccatctctaggtactaaccattagatatacagacatttccgggctctacagacaatgccgccactaaacgatagtgaacagcacgagcgtatgctcactgctctccggcgaggaattcacgatctgcgctccaagccagagaatcgcatgctggtaattgaacggttgaacgcaatttctcgtctggcacgcatctgtgtacaggtcgggaaggacgctcgtttcacccggctttgtgacacccttcagagagaaatgccacgccaaatcgctttgctcaagagtgatataaatagtaatcttatagttgcaaatgcgctcgcccaaatgatccttgaatcgtccacgtttactcgctctatcgttgtttttaatagcgaggatgagaccgacgagcaaagtgagttggatcccagcgatgataactatattgcacgattgcttcttggttcgaaatgggctaaagaggtagttgaccttccggaagagccatataagatgcctgaggtgtttggaagcgctcgtgaagatgaagctgagatggatcccagccatgatgaccatattgcgcgcctgctgcttggtccgagctgggctactccgatagctgattttgctgaggagccatacaaggggaagaaggcggcgggtaagtgattgtagatttgttaggtcgcgcgaatggtcttctctataacagttcttacttgaatcgatgtttgttctagatgaagtagaggacactttgtattgtgggctggaaatatgaagaatatcatacaaatcctaaattacatagtttctagatagtatagagtggtgagatcgttttttatcattcagagcaacgcattggtgttttttaatctctgtaagccaagggaaaagatgggccggtactatctttcctgctagatgttctatcaatatccggccgagtcatctcacggtgaataatgttggtcaactcctcttgttcactgggcgacgtcactgtgtctcgtctttccaaagcagcccttcgttcatcctcgctgtccgatgttccgcttctttcggcatgacgtgacgcttgccgtctgacccgttgagcctcttccttctcaaggattgcagccgtcacccgctccttgcaagccttttcttcgatttcctgttcaatgcacgcgtaatgcgcccttctataaacaccgattgagctggacgtgatgccaagaatctcgtaaacgaagagaataggcagcgcgaaatagagttgggggttgcagccagaagaccatatgtcgatgagtacctggaagacggaatgtgctggcagggcaaagcccagtttgtagaaagcaggtgccagctcaaatgggagaagaatggaagtgacattcgagacaacccacgatatcagcgccatcggcacgtagggaggcggaagccagatggtgaaagtgtctagcacgaggaaattcacatgtgcaaaaagccataatgccagccaattgagtgcgaactggtttccattaacactccagccacttttgaatgcccagattgcaccggcggtacatatggacccgacaagtgtgtaaattgaagagatgactaggcgcgcaatagcgatgcgatgggctgacagcgaggtgtagagtttgaattgaacgtataaaccattgatagtaccaagaaagaagaactcttggattacgatcaagatgataactagggtgttgtagacaacccttgacccttgttctgtgggttgaatattgttgtcggccaatgtccaaggatcgtagaacgctgcaatcgcagcaggatcggagctgttgacactctgcagagactgtttcccgttggtttgcgagtacgccaaacgtgcagtttccgataatactttcatgctatctgcaaggacggtgtcaatcaccgttgggtagcgcgcttcattccacaccatggtgagaacattgttcttatcatacgaagatgcagctgctccacctgcgagtgcggcacttaatgcgttggacgcatttgctgtcgtgtataatgctccccagtatttgatgtcacagactgcaccttcaatcgagccgggctgggggtacgctgaggcagatcgctcaacaagggttggaaagctgggtcctttgaggctttgaaacgcagcgcgggccgcgtcgcttatcgcaccaccgtcgtagtctacaaacaaaacattaatgttatgaatgtgtgaagactgctggaaaagggatccgaataggtaacagaatagaccgaggaatagaatttggagcagaagcagattgatagcagatgcctttagcaagccgaatcgacgcggccgaacagatgggtggtggatgctaggccgctgctctcgcgctctgggatagaactgcatgtaacccggtggagcgatagctttataccagatgagggcgatgatatgaatgtcagactatagatgtaagaagtctgtgatgagcctttcgacctccgaagcaacgagtcccggtcaaaaacaggtatcaagtcccgaagcccggaggggattgtaagtgggtcggcagagtttaaaaggccgaaaggctttcggaaagatagggtgagacgaattattttgaactcatagccctacgaggtgtagagtcaacatctacctcaagattctgtgtcaagattctatgacgacatatcctgataaaggggaaacaagtcaggccacttgatcgaaggttccaaggcagaggcggaaggattctcgggccccacagtgattaacgtcgactccacttccttattatgtaatccggacttggcgaccgttttgggaaggatcccagcctgaataaccaggccgaagatcttatctctttggcccgggaaatggccttcaactgtcctctaccgatatcaatcccaatccggtccgttttttatcatcttaataacaccagcatattaaatcatgatggtcaacttccggaaatcaccggtggaacctttcttcgctgtcttgcggtgttgcaccactccttggtgatcacctctccgcgtgtatgactccggttctgtgatttttgtgaatatctcaccctaccggtaatgtcgagttacagtccggattgagagcagaatggaggtgataatggtacttccgggggaggtgaaaacccacagctgaatggcactactcggtgatgatgagcaagatatcgactcctttttgtctttagctgattggaagggtattcccaagctcgatgctccttttaaaggaatgggacaagtttatttgatgctacacgcgcaggatgcgagagcaaaatatcactaatacgctaggttattccttagttattgccacgaatcttcaaatctctctatactcaaccacaatgaacgcttcctcaacaagccagatataaatctcaacaccaatcaacattttacccaatctccgtctattggtctcacaaatgcagagtcatattgaataattaatgttgaataatcgatgttgagtaatcaatgttgaataatcaaaatattcctcggcaggccaatttctgatattcccaggcggccctcgctttagccgcctcgaatgggcttcaaatactgctttaggacgatagaaacctcggcataggttttaagaaggattattgagaagtaatctacctcggaatactcgccaattaacgattaccctatcgttgcattcgatccttcctcataagagagcgtcgtaacgatatgtacctctctgcttcttatctgtttaccttccaaggatattgtcaaaatggtgcaacttgatgacggcctggaggctgctacacacggtaccattgatgttttacagtcatcatccgacgatacgctcgacctggcattcgtcaatactgcagaaaagcctaaaagtgtaattattctctacaaggcatcctagtccgtggaactcaatcttattgtgtcccagtatccaaaataccccttttcaaaaaaatcaaccctcaaaatgttgaaggttgagtctgggctccactaagaaatccacccgaacctaatgagcttaaaatccgttgggagagtataactcaacctatcccctaatatgaataatcataaaataatgtcgtcgatataaagagcaaagtctcaatcctgatctaggtgtattatcttcacggtctatcataatacagtcctattccgattatggctgctcctaaaataaccttatatttcgacattggcagtccctttgcctggattgcgttccatgctttgaaagtcagtcgaacatctcgaaggacttaatgaatgagaaagctaatgattgtcgatagacgtcccctgtctttgcaaaatgtgacattgaatatgttcccgtctccgtgcgaggactgttccagttgtgcaagaacacgccccctttggctgtcaagagtaggtttctcttctttcttctatctctaacgctatgtactacggattctatatttatatgctaatctcccattgtagacaaggcccaatggttgaatcaagaacgcatttactgggctcgtcgcttccatgttcccatgtccgaagcgctcccagaagcatttccagcgtccacttcggaggtccagcttgctctatgccttgtggctaaacaatgccccgataagattatccccatcatggataagatctatcgtggcttctgggaagagggtgacgcgaatgtcctcactcagcccggtttctctcctatctttgaaagtgaacttgggcccgaaaacgctaagcggatcatggatgaggtgcgtttttttctggctcaaatgactcgtatttcttctctaatattgttcaacagttcaaaagtaccgagacaaaagacattttggatgaaaacacacaacaggtcgtcaactccggcggctttggtttgccttggtttgattgcatagatgcacaggggtcaaaggaaagcttctggggaattgatcatttgggacgtcttgtggattttttgcaactagatgcaaacctagacaagtctttccgcgtcttactctagcacgacgtgttgaagcttagtcctggtcactaccgacccttcacaaccctttagatagacgtcagattgacctaccagccgcatttgatttgaaataacatttcctagattatcagtctcaatatctggtagataggcggctaactcatatgtatatgaatagtaatattactacgacaagaaagacccaggaactgaaattaatttgtagaatactcgatatattgagaagttaatgataagccttcacgagtcggctccttcgtggattggggtacctcggaagaagatcctcaagggaggagcagctggctcggctttacactttacgccggcgactcgaggtggcagctccgcaaagagctcgcgtgtcgcacccgagacagattcattctttgtgatctcctgcaaatatcgtagcacgatctaccactttccatgggcaatagcagaatgcttgctcttagcagtaacgctgtcaaaccaaagcttgacctttgtggcaagattcacccaaagatctagaacaagttagcctataaaagttcaggagtaagtgacttacttcgaaggtaaaactttccggctgggtctgtcctttcaatgtccaggaactcggcaataaatcggaagcagaaagtgaaatcttccccgctaaatccattatagaagtagctgcaagggcctcctcttcggtaatctggagacagcatcgtgtctaagaattatacaaagaaagaaatataccataccagatatatatgttcttttggaggtgagagatagatgaagaaggttagattctacaatgatcgagatctagctaaatagctaggtgaagccaggcatcggcatgtgatcggtacgtggccaccacaacaattttgattctctcttattatgtggtaaattcccacctagcattctctgaggaagtaacggataatttgagatactgaatgctgaatatatttgaggtgttgatgtatgtaccctccttcctaattaggccggcacctacccgaaaacttattccgccataccgccctccacaccgtttgagattttatgccgctctagatagttacctgcaatttatatgtaagccactaacaaaatcaggtcacttttgtcatatcaactgcttcatcaagaactgcttcatcgtcaaggggttaaatcctatagggatcaagtagaatgtactaatttctctgatcaaaaaaggaatgttttttacggccagaatatatggcaaaatccatggtcgcacccaatctggaaggtcgtactccgtactgaaatttgaggcaggggggtaaatctaacaacaccttatatttactcgatactatactatcgtccaagtttatatgcgaactatgtgttcagtagagggggtaaagtcattattttactcacttggtgacgcgatcccgcattgaatggcaacatgtcgttcaatcaaggaccggccctagctaagtcctatttggtctgaaccatgttacgcagtcttgtcggtcttcctaagcgatctatttgcattagcactatctttcgtgaacccctccatctaaccggatttgcccttgccatgctgatcctgcacatactaagcatttgattcatcatcacaggcgcaaatgtcaccttataaacatacaattccttcggattttccccgcggcactactgcacaatgccagatagcgtcggattgacattcgctacgagcattgcgcaatcttaggtgtagggcacgagtgacaatatatatcttgtaaggaaagactcaaatccatattgtggaagttgtcaaccagactcaaaattgataatgtcaagcaaaagcttatcatcgcttgattcaaagcagccgatagtccaacagacgccggttccgaccacaaagaatgctgtaaaaagtggagttttggctgcgggtggttcagtcgagttctatgaacccatcgcggagtacgaaggaaaacatcgatatgatccacttgccgaatggacggagaaggaagagcagctgctcgttagaagggtaatgaagacctttcctaggattcctatactatggaccaccgactaacatttgacatgacagctcgactacagaatctgttcttgggtctgtctgatgttcttcgcacttcagctggatcgtggtaatatcggacaagcattatccgacggaatgcttgatgacctcgggctatcaactaaccagtacaactacggcatgaccatattctatctttgcttcctgtgcgcagaggtgccgtctcaaatgatctccaaaaagcttggccccgacgtatggattcccattcagatggttctttggagtgtagtggggatttgccagggcctagtcagcggcgagcacagcttctatgctactcgagcacttctcggtctgatagaaggtggctttattcctgacgcacttctttacctatcctacttctatacaaataatgagctacccatgcgaatcgccttcttttactgttgttccagcggtactgctatcgtcgcggcgtttttggcatttggaattctgcacatgcgatccatcggcggctgggaaggctggaggtggctgtttgtgctcgagggtgctgttaccttcactattggtgtcatctcctggttttatctacctccaagtccgacgcaaacagcaagctggtttcgagggaaagatggttggttctcagagagggaggaagttatcatggtcaatcgagtcctacgagatgatccggcaaaggtacgtataaagggatttcttttcgaagttcatccatacacatactgactgtgattataacagggtggcatgcataatcgtcaaggtctgacactgaaacttttgcgggacgctctcatggactacgatctttggccaatgtatttgatcagtctcacgctgctggttcctattaatcctgaatcagcatatgtgaccctatttttaaggtcacttggctttgatacattcaaggtcaatctcctgaccattcctgcgaccgtgttattcctgatccaactcatcttttggtcttgggtgtctgaaaagatcaacaaccgcatggtcattttactattttattccttttgggttttccctcttctgatggcactagagctgatgccggtgactgcaagtccttggagttggtacgcagttacagttctggtcattggttctccatatgtccattctatcaatggttagtactaatatcttctcacaacatctcaaattccgaatcctctgaccccgttcttcttatagtcagcttgatctcgcggaacgccggttctgtgcgcactcgcactgtgggtagtgcagtatataacatgctttgtcaaacaggctctatcatttcttcaaacgtatgttttgtgataccccgggatatccttttatatcgttggttggttttatgcctaacatatcttctttttcagatctaccgaacggatgataaaccctactaccgaaagggaaacaagatccttctggctcttgtcggatggaacgttttggtcaccatcttcattaagctctactatatgcggaggaacaaaaaacgtgagcagctttggaatgctatgagtccagatcagaaacagcattacttgagaacaacgaaagatgagggcaacaaaaagttggacttccgatttgcccactagctcctagtgagggcggatgatggtgggtgcatgttacaaatttgcatttgcacttgacggtttcaaaaatattcgagatgaatatacaattatcttttttacacataatgttaaattcaggcgttatggagcgctttatacggattcagcggtcttatccgctaccttgatgagaatgattgcagtgaatatagaacctgaacaacaaatggagtttttccaaggcacaagagcatatgaatactttctacccttgattcaaaattccccatgattttccatgattctgatgttgaggtttggactacaataacgaacagtgcaaacatgctaattatgtgcataattgtgctgattaaatctatgacgccaagaccgagatttatgcacaaactgtaggcttccttcgacccaacttggtaagagcacaccgatccatcctctcccctattctttcttgtcggtttattatctcccccgacacactgtcatgcactggcgcaaggctctagagagaatgacatatctccctatctagtcataccgtgctcgctttgacatctccgtgaaaacccggtctcagtgttgtcaccgttattatccctgtcaactccaacgccgatcataggaagtagtcggcgcaaggcccccgtgacatcatatcctaagtggaaagtcctcaccgactggttaggccttcactgtcatctcagccgccataatgcggggtaatcgacaatggaacaagctcgatgttggacttttctaatgaggaaggttattcttcgatccgatatcgatggggcagtcttgaagtagtaaaagatcggtcgatcggacgatcggacgtcctttgcgaaggacttcacgtcgctaatgttatagttgcttctatgttcttttgttaagtcctgcatgctaaagtactgttctctatactattatctgctctaagttctggtgtctgaagactagaagctgagatcatacagatggactgtagtgtacgactagcgccatgtgtctggcccctgatgaccacgagtgccaacacatgaaagccatgcgcctcgtgtgacccaacttcaccctgggccctatttcccgggcctatcatcgtggagaaacagacattggctaggggtaaattgttggagatatcatatctgggctgcatatttccggattatttcttggcttcgggtcgctttctgtttccacaatctatcgaattttctctcccttgcatcatgttactactgtcggagctttgacccttgatcgacgattatatacccctagtccgaagttccttgccgcatctggccgagcttggcggtttgatccgcacattctattccctagtcacccctagccacccgccccgtgggagatcttccggcctaatctatacgttgtatcatggctctaaagcacagctgaacttagactggcttcaatggtagaattagaaattgtatgcggtcatactgacaaatttaatcatctcaagtccagcaacgtggagtcaagtcgcagggcattcacccagtcatcttgcagttatctagggatacccggtccttctcagaatcagaattctagactcgaatcaaataatggccctcggccgaataaacccaatctcatttgtgccctcgccaaccaacatcctctatggcaagggatttgaggatatctccaaggttcttgttgaagtatcaaggtgctttatcttcccttcttttgttacccttccctttcaaagtcccctagtgatctagcgagtccttcatttgcaacccgtcaaacgcaccttttagctttcaagtattccataacgtagcccaataatagggttccaaaaatataaaatataaaaaaacgccagcacaacctcgcacataattggatggaccaaactacatttctccgagtcccgatgccacctgatggatctccatatcaggcgttgcggctgtggctttcattgtttaatctccttcccactgctcggagttaatatgcccctcggggccaagcagacgcccagcatgtggccttacttcaggtgtcttggtaccctaaatccaatgccgactctgttcccctacattcggacaatgtcggtcaaatatacatataaggacttagctcccctcctccgattgatgatcagcaacttggatcttcgagacctctatcttctgataattcgtccaatatgcggtctttcatgaaatccacttccacatggggtctactaaccctatcccttcttccggctgtcctgagctcgcctctattcgaaaagcgaatcaagggcccctggctgggcctgaacaccaacttcccggatcccagcttcatgaaggcggccgacaacaaatggtatgcattcggcaccaacggtaacggcaagcgggtccaagttgccgtttcaaatgacttccaaacatggacactcctcgatgtcgaagccctccccacaatatcaacatgggaaactgagagcgatcactgggcacctgacgtagtgatgcgagtaagttttctcggcttctaaaaagattaaccctaaaaattaactatctccaaggacgacggaaagtacgttatgtattactccggtgaagcaaaatcagatctcagacaccactgcgtcggcacagccgtagcagaccacccagaaggaccctacgtcccaagcaacacgcccctatcctgccgcctggatcagggtggctcaatcgacccagcagggttcaaagacaaagacggcagtcgctacgtcgttttcaaagtcgacggcaacagcatcggccacggcggaaactgcaacaacggcgtcgaaccgcttgtttccacgccgatcctgctgcagaaggttggcgccgacggtgtcacgcctatcggggacgcggtgcagatcctcgatcgcagtactgctgatggtgatggcccgctggtcgaggcaccgaatctgattctccatgggaatacgtactttttgttttattccactcattgctttaccgacccggcgtatgatgtgcgctatgctacggcgcagagcattacgggtccttatactaagaccaatgttccgatgattaatgctgcgaatacggggcttatttcgcctggtggggggaatgtttgtgggtgcggggatcggatgttgttccatgggttctgtactgaggagaagacgagtaggtgtatgtatgtcgctgatgtgactattgatgggaagacggcgtcgattgcttgagagattttgtttgcattttgcagttggtccggtttcatctggactgtggctttggttgatatataccccgggttttgagggcttgcatgtgatatgtggtgacagcaatgatatactgtttcgcgatttcaaacttgaatacttttcgcatataagtagagaacaactgctcttcgccacaaggaactgtagaatcacaattatgaaaagcacgtacacaaatgtagtagaattaaattatttttttatatcgtcgtatcgtcctaggcccgcctgcatgcaccccagatttattcgtccttttcctctccctcagcttcttacttttcatcttcctttgcctcgtcctctagctgtacttcactgacacgcctcttatcccgtacctcttgcacccactccgctgcaccctgaatcgctacctcgggtgtctccttgtggttgagaagatatccttggatctccgcagcggtaagctcaccactcggaacaacagcagcaaactcagacgccaagtcagtgatacgagatcgaggatctttttctttggccgttttcactcccccattactcttgtcggagttttggataatctcgctctctaccttggcgatgttaccaacaataggagttgatggcaacttgactagcccattgataccattgatgtgggttcttggcgctgcgatatgggcaatgtcgttattcatagccccgtaaatcgagataaaaagctccttgatatctgcttcgcttgtgtacccgaagctgatcttcatgtccacacgcccgggacggagaagagccgggtccagcctgtcgatgtggtttgtagtcataatgaggatacggccttcactggcggcaacaccatcaatcacgttcagaagtccggagagcgtgattccgcccttcttcttcgtgtcgtctttggcagctgtgccatccgcttccacgccagattccttgataacaagatccacggggttatccgaagtagatgtaggcgcagattttgcggcccgagcctttgtaatgcctgctgagtcgatatcttcaagtaggataatgcatcggcgtggtagttccgagaacaataacgacagactctcctcttccaaggccgtggaattcagatccaacaggtagagcttcaatccaagcagtccggccgctgcaaagcacagactcgtcttgccagtccctgggggaccgtgtaaaaggtatccacgccgatatgggattccacggttgttgtaccagcggcgcgtgcgagggtgcaggtattctttgatatcatcaaggaagtcatgcttctgttcttgatcgagaataacggtagaaagaggacgcgctaaccgggccatacaccgatgccagctgaaggcttggccggcggaaatccgcgagccgcggtagattaccgtgcggttcctgtcgcgctcaacataggcctgttgtgcctccgctagcagcgacttcaagatcgcaggattccgaccgagacacgatatgaatatccgctcgttgttcattacataccacaaacccccgtctcggtgttcgcgctcgagcatgagcggtcggttcttgtaccagaagtagtggcagccttccgcgggagtaaattgcatcttcttgtacttgtcccgggtggtgaccctggcccagtatgaatcgaaagaatcgttcttctcgccatcgacagtctcaccctcggcttcttcttctctgtcgagctcctcttcatctgttatactctcgctccagtaactattggttttgatgcctgcgacgaatcgatttgtatttctcatatgcggctgacgtgagatccagaacatcagataatggaatgcctcatcgtcgaggcgaatttcggctcttgacacaaacagctcattgaagttcgcccaaatggcgaatacaaagtatcgagcagttgcgccaaagacagcaaggctgaccaggagttgcaggtaagagctgacatcaaaattaaggtaagataccaacatgcgcgatataaagccatagccggggactagaacctccaacatggccgagtccgtcttggacaaaggccccgttgtggggatagtttggctggaattcatgatcgatagatctgaaatgctcgagtttatttcgcttggatttgctggtaatagagtaggaggaaagacaagataggaccctgcatagcaaaatcaaagcataggccagtcttttatggcccggggaacatatttgagcctcgtgtgttggcctttcccgctcagacacacatatgccctcggccgagcctgagatgtgcctgacacgcctcaattcgcgaacatgcccatgcagcattggtcggagttgattggattggacaggatgggattcagttgggctggttgtgggcgtctgcctggactttgactcattcttgctgcacgtcgctgcggtacaatttcctacgtcatatcgcataattagaccgaagggtaacatttatttatacgccacgttcgtatcgagttaattttgagaagataaaagtgaaaagcgggagcaaaagaaaatgatttttgccggcaagtgttgtgttagaagtaaacggcagacattgttatgctttaaataaacattggacccttggcctagtctaggctccagtggcaaaacacaaatcacattgcccgagcctcgccgttagtgtctcactttatctcgcatcgcgcacttctgcctgaagaaacgttggggctttttgtttttcttgctgaaaatatggccatcataagtcagcctaaatgcgtcagttctatgcgtaatagaagctcccatccattgttcaatgtaagcttaatgaaacaagtctaaaccgaaaaaaaaaaaaagaaatctctccctcggggaatcgaaccccggtctcccgcgcttatcggttttaatgacaagcggaaatcatcaccactagaccaaggaagaatgcgatggccgagttactgctcggccacttggctggttgatggaaacagtaccccaccggggccccatacgggagtttagaataacctcaatactaaaacatccaatcttctacttgatatcactctattctcgtaacaagttaaaacatatttacatagtcccaagggagggagatatgtttgccacatatttgataaaattatctgaacataacggattagtagcacgatgaataatgggactttgattgcctaggttgaagtttaggcacagtcagtataaatctatcacagagtatactacttccttcacttcatcctccacctctatctactattacttcctgaaccactgatctggcccaatagtcgcttaactactccatctctatctccatctatatcttccctttgttcatagccgaacccctgtaagccgtttatccccagatcatcaataaaaccagctggaatctaaagaatcctaacaatggaaacagactgcccagaatgtccttgggccaggatgcccctcagctgactcctatttcaaaggctccaaagcgcagcttccaagaaatgttcgacgaaagttgctgcatagttgacataaatgattgtggaactgatggaattgacttcaccgagaagctccctgataccaccaccttcctgtctacacctcagccaacggacaaactagtggaaacccacaagaaactgaaaagactggctgagcttatcggagaaggcaagagccttgccatccacactaactacgcaaaggctcccaaaaaagagcgagaccccatcgacgaggcaaagaaaagaatgcggtcaatcgagattaagcagtacaatgcctgggtcgctggtgccgtcatgcccactgtcgattggaaaaatagtaacaaaacagttgaacttcccaaagctgaaaagtctcacttcaagcatcaagttcatgccattcgagagatctaccctaattcgcacatcactcgcaagaacgcacactggttcatagctaactttcgctatgtgatgcctcttattgaggcagtcgcgatggtacggcgtgtgcggtgggagtatgtctgcgaccaagaaggccccagccggatagatctggcagatcaagaactcaccgaaatggagctggcggaattggaaacagctcgcagtatcatccggatcaccattaatacccttcagaaaagacaacgccggttgcaattggatgctactctgagggagaaacatttaagcttagaaacggtgatggaactcactggtgcagattgtgaggttattcagaaacgtgtcgacaggatccatgagagcgctgtgcgagacaaggggacgaagtgttccaagactaaggaatagccggatgtcagtgtacgtctagggattgggtctgttgctcatgtgtcctctcgctggctttctgtccacctgctctatgtctctgtgattatctgttgatgaaaaaaccccaagaatgaaatgttttaatgctagtctactactccagttccaaataatcaaaacgtcgtcgcttctactctcgctcaattccttaaagagctgcggcctggtcctgatgttattctagtctcgcgatcttgttatctttaaaagaggatccgacacaaaccgcatacctctaatggcctacagttttacactgaaggaaagtaaagattatgagtcttcaattctgctcgcaactacactgcccaggactttgaagctcattctgtgttgtcctttgtgaagagccatccattctgggcatcatatgatcgagttcaaagcacaaaattgaagccgataggaaattgtgaagcagagagtgagggcacagaataaaggaacgacgtgtgttggtgtaaaacatgaggagagggtcggggacgtagaggaaggttgaatgggagaagcacaggacatgatcgtcttgtgaagagagacttcagacaagacaattcaacctctcgcacttctaaacccctcagtattcttcttgcgattggatggaatccccgcggtcctggatgacctcacaggccatgcgaattttggccgccagtcggtccactcgccgttgttcctcgctcacgcgctgttgttcatcggcgagggttttcatagcaacagtgacaatactgcgtgttgtattcagttccacaagctccatttcggcttcagtgcggttgatttgatcgtccacatacttctgctgcgaagcctgcaccttcataactgcattgatgagaggcatcgcccatggaaagttggcgatgaactgagatgtggcgtgtgggctgatctgcaggttgcggcaaatttctctggcagcatgcaggaactgaacagcgcgattactgtcttctaggccatatggaatcataggaggcccctgggctttggcccactcgacagtggggacgatatcaccacgaatgtaggcttcgtactgttcgatctcgagggcggtcatcgttgccttggcatcggtgatagcatcacgctgaggcgttgcattctttgtgtgaatagcaaggcttttgcctcttctaacaatggaagctagtctttccactttgtcgcatgtttccaccagtgaatccgctggcttgggtgtagacagaaaactggccgtggcagggagagtctcggtgtagtcaatgccgcgattgcttcgattgtttttgtcgagcatttcttcgaacctgcgcttccgagccatggtactcggtatgatctgtgtgggcccgatctaacgactctctgatcaatttggcttttatcgtcagcattgcgaatgattgttgatgaattgagaacccgtgacccttatcgcagcttactcacaggggctgggtcccatggaacaaaatcctagaagttagctattaatatggagcgaagattgatatggagataaagatgaggttgagtacataccgatcggtgggaggagtggcgtgtgatggaagaaaggaaagagatgaagaatgaagtgaaggttgataactgccaccacgaatgtttgcattggctctgcaaaagatcgtgttatttgttgtaactaagttctcaatagcctaccgcccaatctctctgagccccagactgtgaggaatccttgtcgggcttggataaagtaagcttataattcaaaaagatactaccaccataacaaatgtgaggtttgtgtatcatatggaagattagaccgctagctaggaatggaactacttggtacaaatatatgttggtcgagatcatttgtatttttgaagagcggtttgagtgctttctttcgccattctttttgaacgacttcacaacatccttgatctcttccgggcgttgaagtatcatacgcacggtctcctcaacaggctgaacaacggggtttcaatagttctcaagacgtcaccaatcactatggagagggtctcacatcgggatcaactcctagtcagaaattgccaaactaggtatgcacttctgagctgagaaggaacccattctcggtagagtagaggcgagaatctccaatctcgctaatgggtcgagtattggtcatgtactagaccagttgccaccgtatctccgttcctatagcatgctgacggggaatatatgctttagcctcaaggccaaggaaagactcgcacgacccggcaattgcatggcaaccatctcttcgagagcatgcaacgcctcgtgaatgctatgagacaagtagacgatatagcttccccgcaagagcagtttataggtgctggatatatggatcgaggtagtccgcggccggggggaatctcaccgggcaatcctctcagagcttgtgaatcgctcttcggagtatagttatgtacccgcagtggtccaaggccccatgccaaataggcattgctgtaatgaacgagatggattcccgtttgagaatagaaaggaactggtactgacgcaggcagatggtcttgagacggtgccctcatcgcggataaaccaacgaaaggcctctagcgccaagcctttcgcctgcaaagtatcgatattcgccaaagatcacgaggtaccaaggctcgagccaccattctagctgtaacaaccaggaggggaaaacaccggacaagacatgtaaaaatatatatgcgaagacgaagttctaatatcgaaagacgaatttaagctatatatagtccccgacattgataattgtataaataagagtccaaccacagttatatccacaattgagtgcacgatgcactatattaagttgtaccagggccagataggaggaaaaatctggcagagttgatgtatgtaggtaagctcatgcactatgtgtctaacgaaacaagaagtgatcaacagaggtgagttagattgataagaataatctgagacttgtcagctctctaaatagcttgatggagacaacgagagaaaggcccgaaagccatcaatgagacaaggagaggcctgggaagctgtatgaaagtaggaaaagccttagtgcgtacgcctgattgcattaagagtctacgtagaagcatataacaacaaagccaatcacttttatagcaaacaaaatttcgcaaaattatccgcctatcatggcgacgcctgtgtggaacaaatcatgaacctgactctcctctaaggaccgttgagattatttctgctgaggttgtaaggacctactccctgccttgtttgatcttccttcttctctttctcttatatactgagagaatgagtataatttaaacattatatacgtgaacatgggtatctatcaaaatgtaaagctaaacgcacataattgaacaatcaactgtcagattccgggtgtttgccttgaacagcatcggcaacgccaccagcccagttcttaaaatcatcgagtttgtgccagactgtgccccaccacgtcgaacccttctcatcgtcactttggtagtctgtggcgggtggtgcattggctgctgtagtgggtctcggtgctggccgtggtggcttgcgttgtggaggtgatggctgcggatatgcaggttgcgaaggccctgctgttggtgaagtttgagccgggggatcaggtggtgtgtccaaaaccggtgcgttctcatccgagtgaaggccgactggcttcagcgggagtcgtagtgtgccattgcctggaaggggattgacacccaaagagtcacagacaatgttatatacctcgatgttttctatacagattcgttaggtcaaattccaatcgatggttcggagcaggtacttacgaaaaacatccaatcggctgtttggcttatgagggaaggctgggccgcgcgcaataaatattgcacgcatcaatggatgctcgtggtcgtacccgtgaatacctcgaggatggtattccttcccagtcttcaaagcctccttgacatcgaactctgaccgatcaacgagagcccatcccgccttagggatgacccacaatggcgcaatgcgttcgttgtttgagaagtgataccgttcaggcattgtctcccgtgtgtaaaattcaaaagcatgctcgtaatccggagccaccttctccaattgtttgcgaagggtctccagatcctcaggattcttggcgcgcagaccaccagatggccacccgtcaatatgttcaatcagatcataatcaatcaaatcgtccaactgaaccagcctttccgtagaggtagtagccatgccgtggtctgagacaaccatgatgtttaccacgtcggtgagattgcgttgctcaagaccagtcataatgctcgcaaccatgctatccgctgctgaaatggtctttcggatttcagtgctattagggccaaatttatgcccatctcggtcaacgtcaggaacgtaagctacgatcaactgcggccgctcaggtgttatctgcgattcgtcctcaacacccggtagatccaaaaacccaaggacccgatccgccttgcgcgacaagagttccgtcccgttatatttgtccaaaaagctcggctccctgtcaccaatgtgcgcctcagaccccggccacatatggatcgcggtcttcacgcgctgcttttctgcggtcacccagagcggttccgccatccaccacttgggttgcatgctgacagtgggatgggtatagtagaagtcttcctttatcttcgggtcccaaaatgtgtttcctacaatgccatgactctcgggatatagtccagtcataagcgtgaagtgatttgggaaggtgacgctcgggaagctcgggttcatatattgcggggaaacgccattggcgatgagtgagttcagcgcaggagtcaggccacggtcgagaaagtcggcccggaaaccgtcgagcgagataatgatagtggttggcgcaaagagagctgtgccgttggagagcaagcgtggagggtgtgctcgtgaagcccggaacccactagaggctttatacgcgccgaggaagaggatgacgaagagtatagcgatgagagtagttataaacagtattcttcgccatgaaggccgtggaggctaaggagcgaatgtgttagcaagaacatagaaaccagccatggtacgtcttacaggttcatatctgtattcgcctgtcctgtccaaatctaacgatgatgcactcaaaacagaggcattctcgtcaccaattccctcttccatctcatacatcagctcgccgtcttcactgactctctcccgccgtgaccccctccgccgtcgccgctcctttttcgtcttcccgatcttcacagtgctaccatttgggctgaatatcctccgcagaccatgtccagtgccacgccggatcagaagattctctagctcctcttcatcttctagcactgcccggtcgtgctctgcaatttccaaggtgctgcggtgctgatcgaggagcgcgtcatcgtcggaatctgagtcctgctcggagggtgaccgcaacgaagatgcatcgttgtcgtaattggcaggagaaagaagggaagaagtagggtctgggcggcgcattgctagcctggtgaagacatggaaaaagagttgagaggagaaagggagattattgccaagacccggcaatcagttgcgataagcccgatctatggcgttgtttattttggttattttgacaattacatgactagaataagatagttttaactaaaaaattgaggacgactaagcttgctacgtcaggttagattaataatcctttgttgttcacgggttgtgtacctgcttattacggctcataatccgatcaaggtagtcgagatacccaagcagcagtcggggaaactgctgggcgattgtgaaagcccatttcaaatgtgagatatgtccatagtgcttagaggagccctacttcatatagttccagcaaaccaatgcttgaggagatattccgattcggatacggaattactaaatcccggatatcaattccttgaaagattccacctcgcaaactgcaaatgatgagacaagagccaatattaccacgaagctccaacatcgcaacaaagttgggtcatacggagtactctgtcttgtacaatcaccagatccccatctctacgcctccgatgtgactgcctgcagtgatttttgtagaaagtaaagctcgtaagtgactagcatactggggctattctctatacttgaagcccaaagctgtcaaaccccattaatcactatatgtctacctagctataactatattgtattgaattgatatcgattactatggactctgttgacgatatcccctgattgatttgccattgatttacgagatactggaaacacctcccccctccatagacaccgtacccctatcagatccaatcaatacggtcgccaagcctcagctcatctgcatgttgcaatgtccctgggagggttgtgcgcaagattgccctcgtctaattgacgggcacccaacatactcggttaagaggggatcttgagagcggacctttttttagggatcagtcggaggccttcttcttatacctaatctacaccattctttcattttgcacaaacttctttacttccgaccgattagttaaacgaaagtcatggagtcaatgaattggcagaccgacatcaagcatggtgattcgttgcctccgatcaactggacagctctcttcgattatgctctcaaacttaagaggcaaccagcgcatggaagttttatccactcgatcttgccatattcccccatcataccacatgggcggagttcacctggtgagagtcctcgaatttgaggacggcatgaagtgggttgcacgcatcccattaggccagtgcaccagcgacaccaagaaacgcttgcttcatgaagtccacatactttctttgcttcgtgagcgaacggagatccctgtcccgaaagtgttcggttatgagacaaatgggaatataatcggccgtgccttcatgatcatggaattgatacctggcagtactgcgatggatgcttttggaggctgggaagtgcacaatggtgaaataccagctagattcaaatcagcgttctgccgcagtattgcagaaatacaggtaagcgtctggaatactcgcctacggtgagacgtcgactgactaacaggttgccatgtctgaaattcgatttcctaagattggtatgattatgagacatgccggtggttcatacgatgtcgactcaatacctggtataggaggccccttcgaaaccgcagctgaatattttgccgcatggagcaacaccgtcaagtttccaatgcgagacatcgatatcagatcccgtttgccaagtcattggcatgatgaagtgcctgcatcaatcggaggttttcctgataaaatcaaagaagccctacatatattatccgtcaaaaacgaaggccctttccccctctttcacccagactttcgacatagtaatgttatcatcgacggtgattataacattctgtcggttattgattgggaacatgcgggcacggtcccgtggggggtcgtcgattttccactgttcttgggtgttgtacctcccccaatggatttaccaacaaattatgatgctgagggaaaccccgttgacgaagagacacggaagttacggagggaaaggaacgattatgtgcaaagtgttagagatttcgaggagagaggctctgacaacagcctttctactattttggcctcgccatatattcagaatattgcgactgccctggggctatacgagaatgggaaacttgggctttactgtaaactgttcgatgagctctagttagctatcaccctttttgtagacaccgcacccctgtcaaacccaatcaatacgctaaagttgtctctgggctatgcaagtttctgtcaggctgtacgcctaataaagatccctaaaagagaaatatatatcagcttgcatatgtcatctgaggaatatccatgtcagttactccgtacattgtcgatctgtgaggggctcgtcacatgacatgtatattgacataaggattatgtaagatactgttgggacagcggttttagtacatactacgggacagtctaacctaattaggagaggtcgctcttagcactccattttcaattatttagagatcacctgatctgtcaaacatgaagctattcagagatcacctggctaatttatctggtctgtcaataacatgaagctattcaattaatctgctcaattggtctcattaattggtttgctcaatagacattattatgaagctattaagagatcgcctaattaatcatctcatccgtcaagatcactaaatcagttcaactgctaccgatgatatagctaatttagttccgaaaccggcatttgcaaaaatggatagtttaggttgcaagttatccatggattttacctacttttatgttaccaataaccgggatcaactttgttgcttgaagcgtgaggctgaaatacatagccctaaaaaaacacacattccactgctactgcggggaatcacattcctcaaattgatcgcaaatgacaaagatcggacatgacgaacttgacgtgaaagctgcttagttgaccgaagacagagaagcatgaaaatgtaaatgaccgatacttaagcatctcgaagtcaaattcctgatgttaggtgagctgcgttgatgtagactcactagatgccggacagccggatgcagttgttaggagactggctgggcgatcagctctgcgcaggtcacagccttgctaactttgatgttccgagaactgccaaagtcctataatgccatgatagaagtaacacggcagttaatccccaaatacggttgttacgaccagttctataggctatgtgtgctctaccagacataaagtacgtaccacctgccttacagctagagaagtagtgatccttgtgatatcactacgcagagagtcatgggtagatgaccgctactttatgggctcatcttcctagggggataagatgctcttcaccccattgtcttccaagactccacttcttcagacaatgtcttcagtgtatggtcccgaaaacaggtgacccataaatagaatcaacttgtctcttattgtctcatctctgaagtggatcactgtggaattccacgttggagtgttcgacgtgtgatgtccgcttgcgagcggctacttcccaattgggataccatatcacgtgacccacctaagccagcgagatccccacatttcggacgaacagcaacgggggaagatcatgacggagttggtgtcggcctcgtccgattgtatcagatcaaagtggattgagtctatctagaacagtgcgattatccccggatgcggaattcgccttgatctcgttttcgatgccaagacaagaggaacataaccttggaatttttttcctccaattactgatgccatcactaattaaccttaattacttagatgccggattgggaaccgttgcaagatctataaagatgccgtcctcttcacggattctgctatgtccatctcaatcgcatctcaccttaagtaagtactcgagcaccatgatctcaagaatatgtactaatgcccgtcctagctatatcgcttgttaaagaacaggccttatctcattccttgatccaaatcgtgtttgttttccaataaaaatgcacttcacagccccctccgtcgccttgctggctctcgcagccggtgttcaagccggctccaaacagctgcaggaacctcccgtccacgtgaagggtatcatcggcaagcaacgtgttgagcctggtactgatgttgctcctaccggtgctcagaccggtactcatcccattggaaccggcattgtcggcaccggtaccagcactggtagccaccccatcgtgactggcaccccaggcggtcccggcggcggtgttggtaataacagcactatcattgtcactggtacatccccctgctacacctgccacggtagcgcgaccatcccagtctatgttcctaccagaactcagggcacctccccatccggtggtgctggttctggcactggctcaggctctggcactggctcaggctctggaactggctcaggctctggatctggctccggttctagctctggccctggctctggttctggatctggatctggctccggctctggatctggctccggttctagctctggccctggctctggttctggatctggctctggctccggctctggatctggccctggctctggttctggatctggatctggctcaggctctggatctggctccggttctagctctggccctggctctggttctggatctggatctggctcaggctctggatctggctccggttctagctctggccctggctctggttctggatctggatctggctcaggctctggatctggctccggttctagctctggccctggctctggttctggatctggatctggctccggctctggatctggctccggttctagctctggccctggctctggttctggatctggctctggctccggctctggctccggctcaggctctggctccggctccggctctggtatcgaaggctctggctctggctccggctcaggctctggctccgactccgggtctggtatcgaaggctctggctctggctctggctctggctctgtcggttctggtggcgtcaacggctctggctccacctctggcgccggcaaaggtgccagtccctccagccctgtctctacctctggctccgacagcacgaacgattacagcctctccagccctggctccaaggttaccgctccccagatcggagtcattagcgctgttattggcagcatggtctacggtaccattatgctgcttgcataaacgtcttaatgttcaaatggctgtctcttaatgttggtgattggttattctaattactgggtgtatttttgtctttttcgatatctgtctgggaactgccttctggttagagatatgattagattagaaggcgggaggagtactggggtgtctagggaggcgttggaggatatgatttttggtttttggtttttttgtgtttagcaatgagttatttggtaatataccagaacctaatatgattataattctaattcaaaagaatgtttacggttattacttctcgaacttgtctgtctacgtgaacgtataaagatgaactcgaatatattccatcaacacaaacataatgtatttcatcaccagagcataaaaaactaaggctcctgtctaaggcctagggccatatcccagcctgacaccaaaagccaagcctacagctcaaagtataatcccaagtggcaaaagaacagccctggtcatacatctcgtacatctgataaaagcccagaacgcagtttagtcgtccctgcagggtcgaatggcacgattctcggccgtatggctttgttttagggtttacgtttactttaaaggttcgcgtgtaaatatccacagatggacggagattggcttgatcaaggtttcagattggcttttatgtaactgctttgtgtgtgtgtgatccatggtttgaacaaccctgtaccctgtaaggctactttcgagattacgagataacaatagattgtgcggtgattgtaccgtagatttgccgggtcaaagagattataaatttagaccatgattcatgattttgaatttgaaaattgcattatgacttatgattttgaattttaaactggccagacacacctatatataaacacttttacaagtcgagtctcatctttcgcaagaaatgaacagaaagccacccaagcaccatcagaatcagtgcaacgtacaccaacaaggataaagaaaagtaaggcctccaaatcgaacggtcgccgtctcgtctctacacactcgaaatccaattcacccactgacacccacaccccccatcaccaccatcaacaccgccgtacacctcagtcgtagcattcttcgtctcatcaagacccttgaatagtcccgcagccggattaacaaggttgccgccgatagagcggtcctcgagctgcagctgcacggcagtgatattgtaatgcccgtcgttttctagcgggtagcagtataccattttctttttctcggctccgccgtgccggtccacggttatggttaccgggtatggaaatgagcctggccgggagaagtctgttgcggaggaagaagatgtaggggtgttagtggatgttgatgtcggtgctgcggaggaggtggcagtgctatttgctgtgctgttggattgtgggaggagttggcggccgattttatctggttgcgtccagacttggacgaggaaccgcgtttgggaccatgtgcatcggtagcgtgcgtcggcttttgtgctcccgccgtttgtgtccgcggctgaggatttcgtttgagaggttaggaatatggatttgtcgaagtagctgtaaaagccgtagtgctcggttgcgagaccgcggttgtagaggcggattggctgggatgaagggagtgggtacagcattgctgcggatggggttccgtctgcgttttcttccggtgccgggattatcgatgagatgttcgggtatgcggtgccgttggtgctgtctgagcggcggaatatgcttgccgaggagagggagactggtgagaggagggacatgtagaagggggtttcttcgccggcgtagggtgcggcattgttgtctgtgtattggccgaggaagctctgctctgcatcgcttggggctgccggggatgaattgaagaggttatcactcctaacacgtatattcgagctaaccgtggtactgttatcgtatgtgccattgcggaagcggatggaaacacggaaatttggctggttcgcattatacggctcattggcattctgctggcctttgggcaaagcacaactccacatcgaggagggagtgatgcaggtcgatctttcaagctgtggctgcgtcccagcgagtgttgcaatgccagtcggcatgggcggatagcctgttaggttcagccactgtgattgaacgggagtatcggctcctttccttgttagggtgatcgatagaacagtagctaagatcacgataatgaagaagaaaacgcagatcaggaaataccatctccgtcgagtacgaccctcgcgccctggacgtcccgttttcttgctgaatggaccccggccacgccagaaaccacagacccttcggccggtggcttcttccttttccagtctgcggcgtcgagtctcatggggtcctatggcgccgcttgggttgacgctcgtaattccagctgcaggatcttgattgtagcttggctgcgtatcatagcgatggggtagagcagcttctcgaggatattgcgtgtatgcaggagccggtgcctccatatccgacattggtatcgagccaggtccgcccgcggcgcgctggaaaccgggagagataggctcagaagcatgtaaaggtcgttgaggggcgagttcagatccttcagataatcctcgttctgcttgcggctcgtcagacacatgctggcgatcctgagccgaggacgcctggcgtcgaacagtaggctgggtttgtggtacaggcggtacaggcggtgcattcgagtgagggtgtgcgcttgcactaaatggccacccagacccagattgccgtccttggataacaagtggccctcgaggctggtttgcataaccataagttgcctgtcgtgtctggggaggagtttgtccatttgaaacctgagatccccgagaagttccttgtgtaacagaaggttctcgtggctgtccttgtccatatgcccattcaaaatcagaagcttgttgatgggtagatggcggttgaacctgcggttgctcttgcggtcctcgttgtccccatggccattctgacctcggtgttgcgacttgagggggtggctggaccatcgggtcctcgattcctcgcgacatttcctgcggctgcggctgtggctgttgcaatatcggctccattggtgcagcctgcggtgcgaagatcggcacatattgcactgctggttgcacaggctgtatctgaggctgcggtgcaggcgaagtataatgaatattagtaacagggggtgagatgttagtgattatctgcggagaaggagcgggagttggctcaggcataggaagaggggcaggagggggagcggaagctggctcaggaacaggagccggcgcagaagcctgcgcagggccaggtgcaagagctggctcaggcataggaataggaatcggagcgggagccggcgccgggggcggggccggaccccgccccctgnnnnnnnnnnnnnnnnnnnnnnnnnnnnnnnnnnnnnnnnnnnnnnnnnnnnnnnnnnnnnnnnnnnnnnnnnnnnnnnnnnnnnnnnnnnnnnnnnnnnnnnnnnnnnnnnnnnnnnnnataggaataggaagcggagggggagccggcgcaggtgcaggtgcaggcgccggctcctggacctgtctgtcagtcacctctacaggcgctgcaacaggatccgcaacaggcacaggaacaggatcaggatgcgaagcaccacactgacaccgagacccagaaacaccatccctagcactatttgccgccacagaccccttctcatccccatcctcatcaacaacagacgaatcccacgaattcgaactgaactccgacgccggcgacaacacctgcacctccttcgcgcgaaccgcgtacccagccggaatcgtcgacgtccgcgaacgaggcgagtcaatatcaataagcaggcctgtgttcttcgtcgatgtcgtcgacggaactggagtctggtttccgcgcgtcccttcaagatcagctccgggctccccatctgcaaacgcaagttctcgactaccatcttcagccccgtttgtagcacccgctggcatcgaacccgggtttgcgggcgttatcgagcacacgtggttgacgcatgcgaagtacggcgttttgctgaatagctcgtgtgcgcaggcttggtagtactcggcggcttcgccttggattgtttggttgttgctgaacatgaaggacatggtgttgtgtctggttgagacgtttgagacgtatgcgggtggtggggattgatggcgttcgggggcttgagtttgagcttgagcttggtattgatattgctctggttcgaaggatcgggatatctcgaatgccttttccccggtcggtgcggcggtttctggtgtatctggtgagaaacaggagatttctttctcgcgccggatccattctttcgggcctgggcgggttgtggttgttgttgttgatggggttgagggtgagtcttgtgggaaagatgggctgagtggggattttatggaccggcctagaagaggcgagaggagatatgtccaccagccttgtgaatagggtctgttttcgtctgcttgggtgttgacgctgagacggccttgttggtgctttgggggcgggcgtactgtttctggtgtccggggtggactggcatcttcccagattgaggctgttgacagggcgcgcgcgttccgatctacgcctagtgtattgtggtatccggtctctgggataggggttttggtagcagctgagtgctgggcggggatggctggcacgggtggcacgtctgcttcatattgccagagacggggtgtgggctgtgagtagatgcttgatgttgctcttggtcggagcatctcggtgctcgagtttgagtgtgcgttccaaggtgcatctcctctcgctggcgtgacgataatcgagggtgtgagcggcgtgcctgcaccgtcgtgctcttgtgatctttccaccgactcgctgcgaggcacagtgagtccgatcatgacatggcggtctgagggtgagattacatgctgctgtctatcgtggaacgtatcttcatctttggcagcaaggaacgttccagtttcattatggctgttctgactctgcaccgtctcagataaccgctgaaagccccgtgaagtcctcttcttaaagatctcccttgacttctgagccgagcgttccttctcccgcactttggaaagcagcttgaggtcattcagatcgacaaagggcgcagccgcatttgtatccggaatcgactgtttcctcggcgccggcgccaagctgaaatccgtaaccagattcaagccgagtggtttcccgacgcttttgcgcttcttagtgatgcggatattcagtctcgagctttcgcggacggaaacggacgagcgattcccatctttagcgctcctcgcctcgagcttttgtcgcgttgccttggatagaaatgtaaagggtcggtctccttcttcctgatcttcggaggagcctgagggacttaggatttcttcgctgatcggcgatgatagtgggaagtttggtactgggacctggaggtctggttttcgtttgaacatagttcagtagacttgactgtgtcatgttagttgcagaaatgagaggactcaggtgtacataccatgtgtcaggaaagcatgaaaggacgaaagtgtagaaagacaaacaaagagggtgtctattaatatgatagcaaataaaacaatggaggcaacaatacacaatagcgctgaatagagtcgattgagtcagatgtagaacaaaagaacgacaaagaaataggaaagcccgagatttaaatcttcaaggtctatttctgcatcatcacagtgcagaagagcccagcccgatcacttacagcacagctcgagctataaacaacccagccaatgatcatcggcgctggggaatttctgcagcgatcccagacatcccgctgcaggtagctccgtgctgcatctttgaggtccgtcattggacggctggcagagagatcaccaggggaagaggaaatgaagggcatggattggacgagatgtcagactgaggccagtcactacgcgccgagccgggggcgggcgcttcgagaggccaattagtggaaggacagaaatagatctccagttagattaattgtaatacatacgatttgaagtctgaaacatgttttcgtgctactgttcatattccaaggatggatgtcatattccacgtatagatgcttttgaatagacatggatatccatattccagccattccagctattcaatgttcgtattccatatcccctatcttccatgcagagtggcctcatagaaaaaaaaaaaaagcaaagcaaagcaattgcgggtatgaataacaaaatatgaggaaaaaagagaccactccatgagatccaggaaaaaatcagtataaaccaaccccgaagtcgccagtcgaatggggatcgcatctatagagggatatatgataccaagagaaagtcagaaacgaagtcgttgatgataggttttgcgtgactagtcatatctcatacacagcttgagctttcctcgcacctcacgccacctgccgtcgctaccgtcgctcatactcaatgccctgcataggcgcactggagccgttcataagaggcggtagcgtacgcggctgctcctgggtcacggcattgccgaacccgttgtaggggccctggccattgacctgggagttcatttggtggtggtcgaacatggggcgggggacgccgttggcttgctggagctgagcgcgcatctcatctatctcggactgcataacggcccggtcgcgctgcgattgcgcgacggttttctccagcattgctatgtaatcaattgcccgtgtgagcgtctcccatttgctggatttgttggtttgcccgggcggtagacgcagccggagcgcttcgaagcagtctttcatctcgcttcgccgtttgcgctcggctagtttgtgcgttacgcgcagttcgggcgtacggctgtacggtgtgctgccgggcggaccgtcttcttcgccgatcaactctcttactgccttgtgttggagggagtggtggtggtgtacattttggggtaggtctggagattgttagtattgcgcgtgcaggatgtcttgcgcaggttcttaccgtgttgacctcgtggcatccgttccgagtacatgctattcatagactccgccatacttcccttccgggaaaacgcagggttggattctcccttcgagctgacagagcttgagcgcgccacggccgggtccgggaaggcatatgccatacccgccgtgggtgcttcagcattgtaaatctccgaccgaggattcgaggaaatggccggagcagtgcgaccggctgcaaaactccgctgctggtcggttgcgcgagggcctagcggagagagtggctggttccctcctgagtaccgaggtccccggtatgaattcatgtcggtcggaatccctcgctccctttgtagacttgaaacgatggatgattgggaggcattggtgctgtggtagggcgaggccgggttgattgccagagaactgatcccttggttcatgcgactgtcgacactgctgcgccgagactcaatggtctcggccacgctcactcgttgggagggagcttcgtagttctggttgattgaagggagggtggaattcggctggccgaagttgggagagggttgttgagtgccagcggaggaaggggtggtggattgatcgtggggataaggggagcggtcgacagccggatgtccgcgattcggagagggttgcgacgcggagataaagctgagggagggatagttgttgccggtgccattggtcgctgtagagtaggtagacgatcctacatggtcagcaccgcgccgctcccattccgtactgggcgagggtttcctacttgtgctttgcggcattgaccaattcccggagtcacgctcaattgtattcagcgaaccattcccgggggatttctcggcgggggccccggtccctggcatatttgcggtgagggttgagatagatgggagagtttgcgtggagcctgcagtcgactgaggccctgagactgcctcccatgggcgatgtgcgacagcaggatccatggcgggagaggcacgatcaggcggggggggggagtgaagaagaatcgaatatcaacccgctctttttcttccacactatcgcatattccaaatcgagagagacgagattgaattcgagaaacgattcaccgtgaaaccgttgtcaaagtttccaggttcgcgcgaggtaaaaggaaggctagatcggaggttagacctgagcggtccctgcaacgccgatcaagcttaccgtgggacggaggagtgaggtattaggatatagagtatatatagtattatgcagtcaaggccgagtcgagagagtgaagtagagggaggtgagtcgagggaaagattaaagaagtagaaaattggagactcgaaagccgaaagcctcgacggtctgaaactcttttttttcttttttaaccttctttttggcatcccctttacgcaagatgaaattaaatagcacggaaatgaaatcgaaaggaaaaagacggaaataaaagaaataaaagaaaagaaatgcaaagaatgcgagtactggtattaccgccaaggccctactgcaactgtgtgtgccacgaggctgaccctggggagtaaggactaggctatacttggcttgttattgtattagcacttgagttagattatattactgttattaaccctaactactctcttatacatactcaaatatagttacattcctgaatagattcctggaaaaagcaaggagaaacacgtttacacggagtcttaacgtcatttagcaatagaatataaaacataaaatagagtagaaaatagaacaaaacacaaaacacaaaacacaatatacagactagaatatagaatactattacaataccttcacgtggtcccttgcagtctcctacttattgcccagtcaagctgcattcgcgaccggggctcactgcacacacccgggagattagtactgtaaggtcagtctgtataaacaaaccatgttgacgttggacacatggcagaggatgcagggttgatcggcagtctcgggggcgaatagttacgtttctactttttctactttttctacttctgtttggcgattggaacaaagtactaaagttgtctagtacgaatccattgtgctaatccttgtcctccatgtgaagaataacatcttttcttcagtcccacacatggcctcttattcaccgagggttcacatgttctgatctatatcctcatccttatatgttcttatttctatttctatttctataatcataattacaatgtatcgaatacccagctaaaacagatccactccctttctgtttgtaacacctcggacacagacagaaagtgtgtcacagatcacccacgcttccatgagcttgagcttcataccgtactcatgcacccacccgtccctgccgcccaaatcatcacatgttgacctgtcagaggggcctagatgggtagcacagcggactggattatgtcgcgcggctattttcaccaacttcacgggggctgttgagggtaatatcccggttccgacagttcagtgtgacctagagtcttggcgaatatgatggatcgggatctcgatctcgtcgattggtgaagggaggtcgagtcagcaatatgcgatatattaatcatatagtctgatcgattcctttgggaagaggctatttacccgacttcctagtgaatacctgccaggtggcttttgggtgtatcgatttcatactccgtttgatcgggtgttcgtccagaaatagaccagccccaaccgtttgtaacctgtaaacctataaaatacactattgaaacgattgaatcaattgaatcaactccaaactccaatcccgtgcatcggcccaatggacaccgccacactgtggctgcaataacacgtcgtccttacccacatgctctgcactacctaactatgtatgtagaagtaatttaggcagcacagattcaatacaataaccatatgcatgtcaactaccactgtctatcatcttccccttccagcatgccacatggcaccatcgtcgccttgcagaatgtctcgatcgccacccgatctacggcacattcctcgaacctctgacaccgtagcacttctccatacttgacgataggacacagcttatccaaggctccaagctcaatcttgccaaacagctggtctttcggaaaaaaaggtccaaaaaaggtccacaaaacggcccatcggcaacgggaattctcagtacgactctatctctacaacgttgtacaccctatcaagggatggggtcactatagagttcactatgtcaatagtgcgtggctcatgcgaatgcctcctctcatggcttgcccatggctcgcccatggcaaacccccatgctctcccatcccatctgctcggagcccatggcaatacaccgtggcccttgcccattcctgcctccacgccttttcggtcgtggtcatgggccgtgccttgctgccctttcccaatagtctgtatggacgggtcgtaccgtccaggggtgtaggtactttttcttttcccttccttttcctttgcctttcctcttgcctccaattcccacttcagcttatcccctcgtatggcagtacccctttgtgcaataatggactgtaatgaataatgccccagtcattcgaaagtctcaagcatgtatgtaatgccatcccgcgcatgcgtctgcactaccacctcccactagctacacatatacaacgtagatcgtacatacattgcacatacctgtctatttgcatatgtacgtctgaagtactctttcctcttcctatgttgtatgttgtagacagcctccccactcaaactcctgccgacgatcctcacaccggctcccgttccccgaagctggggagcgcacagccaaagcttagaggttacatgcagacaaggctggcagatcataccgggatttccaaattagaatgtgagcacagatgcaattattcaattatcgtccagcatatccaccacgaccagaaacctcccgtcttgtccacccgtaacttccgcgtgccgccgcccaaccacctccgtcgtacaatgatttcgtacccacctgcacactaggtaggagtgttgttggctattctgctgaaacagagacaatattggcgctcggctttgaaatgtttggatccacttgtgactgaaataacaatggctagggtggttggatttgcctgtccttctgctcgtataaaatatcctctttcctttccctacgcatgatactaccggaatccactcgggtcttcacatgactggaatctcaagcctgacttccaccactcttcacaattgtccgcctccctagactcttattctgaagggcgagattcctcgcctcggcttcgatgtcatccacactccgagtgagcataatatatccctcgtcgtcgagtgcaaagagggcttccttcagccacacccggcaggtgattctctcgcggaatcgcactgaatccacgattgggatttggcgcaggcggtcgaggaagggcatgtggagggtaggattcaatactcctattttgagggctacgaggagtgcttggtcgtagatgacgctctcattgggcagatgttcgaagcgccaggtgcttgtgtcgatgtcgtttagtagatggtagacagagcctaattttggactctggtgtagatagaggctccagtggaatgtgtagctcttgtcgccgcggttagataataggatgtagaggccgtcgacttcgaaggggagctgtggagcgtctatgttggactggcggcttttctctgatgttgacatattggatgcttatgaagggaagacacaacatgacttgtatgagcttgtcttaatcactttcttgttcgtgtcgtgacacttgttctacataaaccgcctaatccgaccagttcattggtttggtccaatgttcagtgtttcgcgcttaaaattgggtcaatgactagatgagcgccacagcagcctaagtaacagatcaattggagaaattacaggaactaaaatacaacgccattgctacctaaccccaactaatcccaacgttggtccctcaggctctcaggtgtcgatggatccatgacccctcactttccccaacatcggcccatcccgagtggaattgaacatcagacatatcatcgaggacaaatacaacagttaagatcgacgcgatctggcttaatccaccaggcctcaaatgatcaccactggcgaagctgagatgaggtcactaatctgcaatatgctgctactacactgctttatgctagatcagaaagtcccccccgtatccatccaacaattccttgatgatcccaccatccgtactccatatcttcacccgatacccaggcatgattggcagatcattccacgatctccctctccttgaaatcatcgtggcacaccacaccccttgcctgccacaaaccccactggattcatcctgttctcggttcaggcgctgtcgcgtgtcgaatgtcagaacgccccgtagcaaaagggttgcactcaatacatagtcctggtggagccagtatttgccaaacatgtcttgtcttgcatgttgagaattccacggggaatcgtcgccgcttcccggcttccctccttactggatgtggatgtgtaaatgtaaatgtaaatgtaaatgtaaatgtatgttcggcgccatgtgtagcgtagctctcgcttttcctctgaggtacggagtacatacatgcatcgtacatgtgcactacgacataatgctgtcgatcatccacttgtgcatattttgtaggttgcttggatttacatttaggtacatgtttttttggtcgattccccccacttccaagattgtatcgattcggtagtttacacccctgtatcattcgaaatggtcgtgatagcccttaattaacactcaattcttcccttgctgtgtctcagatcgtgtcgccgcccgaggtccattgatcccgcccatgtgcttgtgcttgtttcagttcgcgcctctcgggatcgccccgcgtgtcttgtttactttgttatgggtttcaattgccgctgtggatgatgtcagtggactctagaatttgaggtcaagattggaacttgctaggcgctggtgcggagattgtcttgatgcattggtatattctagtctggttgtattttgaatgttgaattcaacgaattagttgaaaatgcgaatatgtatagcgagaatattggtccgacaatatctgcaagactgtaaacagttttaaatgttcaattgtcccattggacggtattttcgaaatcatccgcgatccgtatgagaaatatatctacggagtacgagaatccagcgtgattcgccaacatcacaatgagcattcttgctttgcttattacattagtcttctacttgtactccatgattttcacacgaagttttcttacatctcgcccgtgctgtcctccactataaatctacggagaaagtgggtttgcgggatccatcccgcgacgcgaaggctcattacaacttagcagaggaaaggaagaggtaaggaaagaacacgccgaatcgtacggttagctttgtcgtacatctacacgttggattgagctgtgaatgaaagctctattcaaattaaagcctttagggtccgtttgtcaatgatggctaagagttaaataggtctagaccgactcgtgtcatggtggacaatggacaatggacaatgtgattcctcttgaacttttaagctaacaaccaaccttgaggatatgttgcaactgacctttttatgccatagcctcaatctgcagttttaatgatgattcgacgcgcaataaattgagatagatgtatggctttatataattgttgatgctgaacctttgccagggctgagatgctgaagagaagtgtaaatcagaaggaatacagagttcatggtcagctacttcgcaggtaaacttgatataatccctgttatgtgatatgacatacaacttgttctctcttcgtttgtttaagagaacaaggaccagcaagaccgtaggctctctaacctctgcggttgtcaagggatttacatatctccaagagaaacatatccaaaccagaaccatcctaatataatccggaaatatcatcaagtcaattcaagtcgtatatgcgccatatataatatctacaattttttcacatgtatggatgcagccatgctcatgatttactcttcatcatcctcatcctcatcctcatcctcatcctcattatcatcttcttcttcatcatcattctcctcaaactcaacgccaatctcacccgtgatatcccaccggtcacccttagccgcagcactgacatacttgacgaacttgagagtgccgctatcccgcagcacgatgctgagtcggttccatcccgcttgcgtgctgaacagaatgccatcgtcctcatctgcacctgctgaccggtaaatagccgggtcggccttggtcttcttccgacccaggacttggtcggcgttctcctcatcctcctcctcttcatcttcatcctcatcaccagccatgtaaatctcgtacccacctagtgcgggaccttccacagcgtcgtcggttgttttttccttcggcttggatgtcttagcagacgagccattggcttctccatcctcgtcctcatcctcatcatcgtcttcctcttcctgcttctcccatccggtggtcggggtaagacagagcgagaactccagtcgaggctcttcgccctcatacgcactggcaagagtatagtccttaccgcgacggaaccgtctagcaagtaaattgtggctcgtgagatggtccacaccagtaacaagcccaagccacttccggaaaggctgtgacgggaacagcacgttcaacagctcctggatcgggttatcggtacccttctctccggaagcatgctggtacaaataccggtgcttgtgtggaggccgagcaaccgtccacccgcgctgtgtctggatctcatctgcagaatcaggaagaggctgtctctcctgctcctcgatgtacgcgctcacgcgcgatccaaatttatcgcctaggaaccgttctaggctgagcgaggactcggctgagaacgcgtctgacatctcctcggcaatatcgggcgtcaggtacgaaggcgcaatgtactgaagtaggaaggccaagtcgctctctgtgaactcgccctcggtctgctcttccactttgcccttgcccttgccttcgacttcgggggtttcccaggatactggctgtggctgcggcaggtcgtagatatcgccgcggccctgcagctgcgccagactgctgcgctcggcgagtttctcttccagtccttcctcgtagccgtcttcgccttcttgtgggatgtggaaccagccgctgatagccatgcgcacgcgcttcttggtcttgtcttcgtcgtcacgtggatagtacacttcctcgacatcgtggaagctctcgcccggttggacggtgaagaagctcagttggttgaaggcgggtggaatggagaggctgtagtccgggctgggaattttaacgtcctcccctttggcgtccttcttggtcgttgtcgggaacaagcgcagggcaccgccccactcggcttgccagggtgtgtcggggtcggtcaggtagaggatgtagctgactcggcggctgccgatgacatcgtcgtggcagagaaggtggcagccctcggtgtagacgttgatggccatgtcggtcttttgcccgcttagcttgccggagccagtcacggacgacaggtactcgcggaaccgtgctgagtaaatggcatcgcgcagcttcagtagtgacggcagtttcgagagggaggagtcatccagtccatcgaggttggcgagatcgccagactggaagatcttgtagatgtctgtttccttctcggtgaaggacacttgcgtttcgatctcattgcggacggagcgaagcagagtgggctcaatcagagggtgaatgacgccatgaaggtagctagagattgagccatgttagcttttgccattggaatattctgctgtatatacatacggagaagatttggcgtattcactggtgtacttctgctgctctgcagtgtcgaacaggccgtcgcggaagcgggcagcagcctcctcgctggagagggcccgtttcttggacttgggcatggaattgccatcgagagaggcccttgcgtctgtcttgcgcttcatttttgaggtttgcagaggaatgggagcttcaacagcaagtggcctgatgtttcatagatttttccgggcggtgagggggcgatgaggcggtcactgtgtttgtgttggatctccatgaagatcgcagttcacttctattgttgagtctattatcatttatacaatgtatggtacgtatctgatataattgtagtaaaatctcaatcagtattgcgttaagcgactgtattctaggaggcctggtctcttcgtagatgagtggcgcatagccgatgtccttgtctttctaataaaatagttctgcacgtcagtctttcctttctcctccttatgacctgaaagagcaagttcctcatacccaccgtcttcgtttcgatcgaagccataacagaacacatgtgattgcgccaaatccaggcaccggtgtcgtcataacccgccttatcaccgcaaagacctcgattgtccccccacttaaccccaacctgcttgattcttcaactctgtcgaatctcattatgcagcaaccaggggctgaagccccgatcccagatcagccgggaactccacctcgcccgccctactccccggtaacgcccgtgtttgctcatctcgtgccagtcgcctccaacgagccatcgatcgtcccgccacccgcatctccctctccaacatcacacctccctccacaatatggcaactattcaaatccccctcctccgcccaatccacccgtcttcaagccgcaaccacccccaatccctatctccgagagcgagaatccagatgccatcgcgctccgttcggccatctcgattctgcaaatgcagaagcagcaaagtttgcgcgacatccaggcattggatcgcatgaaagaggccgccgctgctgatccagaggggtttgcgcacgagctcgcagcaggtcggctgaagacccaggaccacggcgctgtgattcagttctcggaggacgatgcggacgacgaagagaatgaagacggttcaaaacgcacgaatccagacggctcaccagcttcgaatttcggccatatccctgttccgcagaatatcgtccgtatgcccccaatcaactgggctaagtatcaggttgttggagagccgcttgatcgcatgcacgaggagcagttacaccgaccgagctctggggagcctcgacgaggacgcgcgccggagcatgtcctggcatcgccgtatcggccgtttgtagatcacttggagggaccgtcgagactcggccgtcctaacaaggcgaagaagacttgaacacgccaacggttctgatgataatggatatgggattatggacttttacgaagttatgtactttaagattatgaacagagctggacttgtgttttcttgactatttaggtttcttggtaagttggcgttttgtcttgtgcactttcttgataaaaaagacagaaaggaaacatacatgatttatctatgccttgaaagtgtcaaggttctaaatttgttgtacaatatatcatataatcaaaagcagatgctgcaattatatacaaatccttatttcggattaaggagatgaccttccgaagaacaaccatagcttatcccatggtgagactcttctgcaaatgttcaggcaaagcaaacagagtttcttcaggcaaacaacccttggcctcatcaaccttcccatccttaagataaccgtcgatcagcctcatagtagcagtcacgtccgtaatcgacacaatccactcatcaatatatcgcccgacagcctccccactcaacccaacctgaatactccgataatctaaagaccgcagaaagagatcccgctcgggatcccactgaacgcgcaccgggctggcacgcagtttcttctgccattcctcctggcttgtctcactaggcgtgtagtgactcaaacaggaatggcgcaatgcccattcgaaaccttcgtgggtaatctctatcgctaggacacgttcctgtcgggctttggttgcccagcctgatcggtatgccatccataggaaagagggcttgatccatgtcattctctcccgtgaaaatggtgggacgaatgtttgggctttgagtgctggctcggctatctcgggggaatatgcttggtacactgtgattgtatttgcggtttgttttgctcggatagccttgtagttatttgagggcattttgagatgtgtggacaagtgttgttgaagagcggagatggatagataatattcatttgcgggaataggaatgatgggacattatcgtaaatcccactgtaagctcggaaattggacttcggcttttaagtgcctacgatatatcttggccctaagcctcatagtacacaccaagcctaatcgggactccgctatactccatcaccggatcagctgataaacccaattgaaaggatagtcttccttcatacctgaggccattgctgatgcctaaggactctttgtatatgtagtataggaatttccgctgacagagtagccgtcagtgcaaagcatcgagagttggactatggtgcggtgccaagcacagggaggtcttttatctgcaacaacacggctggcaactataaaaatttaagtttaagatgcgctggcagtcgtgagaaaatatgagaacatggagaccactgataagttcagtacagcgtctcgtgaataaagagcccttacttgcatcggttcgatactacagcaatgtctgcaaggaactctttacgaagttatcagacatagcttcgaataaaaatatcatagtatggaaaacactaaattcaatgatggtcttctgacaagaaaagctatgcacaagactttggcctagtcctgagctaggagggcctcctcaggtgaagaaaaaaaccccccgaggacacatttgtcgtgcgttcacttcttgtgtggacgctttctaatcacccgatcgattcctcccattgcctcccagtaacgtgcatgagcctcctgggtacgcttcctgttggtctcggcatcgtcctgggacatgtaagaggtgtcgtcaacctcgaagggcgatgcatccagagcttggttggtgcctagcttttcgacgatcccagagtctacaagaagccgggtgttctccctaatgcgttgatcggcactgggatcatcaggcttgcaggctgagagaatatggttctcacaagccgcattcacaggcggctgtgcgagatggatctagattacttgggtcagtaaaggatcggggagtagtggtctggaataagtatcttacactggggccaccagagggcgtgacaggcctggatgtcaagatgcttccgccgaggggaatgttgaagctggtgttggccaggatgatggcatcggcgttcccacaatgctgatagtgatattgattcatggaccgtctttgggcctcagggacatggggatgattctccatctcgataggtggtggaatgacttgatgatgttagcatggatgggtcaaggtgaagatgagattaaagaagaatatactcaccagggggtggttattttggtcttggggatgaaggaacagagacaagatccttgttctggcaaggctgagggcgttttgcttgacttcttagaagaagaggccggtattttgaaagattgaaagagatgaaagtgtcaagcaatggatggtacaatatgaatgtcttgagaagttgaccgtgaggcatgcagttgtgatgagcaagtcagagaacatggagcggttgatgctgtctgtgtcaatcgaaatgtcaatttattactctcgaatagaaggagcgatagccatatctactagtcgctatactaacaggaaggacaacacgaaatcttagaaatacaggattcaagattcaggtcgagatctcagggtatcgtcattataatatgataacatgaaagctgcaagatgagcttgaataaatgcttttgtagtggtttcatattagccatgtacaaccatgagccggaaagcaaatagaacgctagattacctgctggttggtagatcaatacgggaggaatccttctttaattcagatacatgcacattgttcttctcagtgtgttggtcatggtacattttgttgctataactagcctggcaggtttggtccaaatgctgtgaaaacatctagccaatctattccgtgcttgggctaagagctttatttccagcctcttcggaaatatggcactgacacaataggatgaggcattgttctaaatgcttgaaccaagaattgagtatatgtacacattctggtataatatgaacaaaggaatccaagagcttcgaggttgcacccactcaaagcttcgctttcccattcttctcaaactgctgtacagcctctagccctctttgccgaacagcttgattcttctcttcgacattcttccgccactgcaagtttccagcatgatcatccaagccgtttaagatgccacaatacatctcctctttcatggtaccgtagataccggtggcagctttagtctggagcttgcgggtctggatcagcgcaagcgcttcctcagctccaccaacggcatcaacgataccagcctcaagcgcatttcgtccaccaaagcggtgagcttcgagaaccacagtccggaaaacgactggcgtcagcttctcgcggaatatagacatcatgggtgtctggagcgggacgccaaattccagctcattgatacagaggaaaccacggtctgggttcatgactcggtagtcatgatacatggccaacatgaagccggcagcaaaagcgtgtccatttagtagacacacggttggcatggggtatctagggaggatattagtatcttaaatatacataactcgacttgagcctcggactgatcatttaagaaaaaaacatacgtcaggaagcgtcggaacaatcgccagatccagttctcgcagaaccctttggttttcttgacaatgtcgagatccagcccattgctgtagaacttggcaattccactagtcgtgactaagacacctttcgggtagcggtgctcgacaatgtcgagagcgagcagcagagcatcaataaaaatgggtgtcagtcggttgtccgggggtgaactaaaggtgagcacgtagatggtctcatgctctttcgctgtgctagggtttgtgcagacgatcgagcctccagtagagctgatcgggacggtgaaaagagtcgtcatgatgggaatatttggtgtatggaagttgttgaggaaacatagcttgttcaaatagatcgattatttgaatactaatcagacctcggcaccatcacatgccgcaatgatgtcatcacgtgattcccgaagccattcaaaggaaaacacatcgctcgtgatatttacagctcagaagatcttcagcctacacgtaatgaaccggaattcacgcttctctcgataggaaattgttcctaccggggggcaatattttatttgtccgagctcgcaatagaacatccatgccaacccaaatacgaacttgtcaagctcctgatacgccgtttcccacattgtcattgacacatttctcttggagtcggcatgttcagggtcaaccttagatcattagcgcctcttctgaacatccttctcatccctacgtgagtttcttttcagcaggggtgacggcctgcgcgaggaaatgataagcggatccaccatcccggccgcttcggggtaggtggttggaagagaactgcttcttccctcaggtgaccatgtccttacccttgacgatagccttgaatgcggcaatggcgtcgtctagggatacgacgtctgtctcaactcgaagattcaacaaccttggaaaaagcttctagatgtgcacaagtagcggtcagttatattgtgtaacataggatagctattgaaacaaaccagaatccgatcagtaagatatccccaatggtaaggaaatagatagataggcccatgccaacgttcgatttaaagtgtccggagatttggcatgctcaaatccggggcacagatactctcttcggtgctttagcgcgaaagaccagagtaaggtacaaagtgtgtaacttctggaagaccaaattttccagagctggtttgtaccactgcttcagtcttctggctatatgttttcatagttgcagctttcacaagaccggcatatatctagcggcgctctagggagaagtttatcatgaactcgtccaggtgcatcccacttgatatttccatggagctccagaatatacgtatcgtgacctcggggcgacgaactccacgtgtccgttgagtctcccctgaactggcctccgccatgccctcgcagaagatccccagatggggtggggagggcgaaaggcctggggagagtgggcggttaggggcccttttggcagaggcatctttgcctagagagacactcttggtaaatatgggtaagaattcccacaagcacttctcgtttactcaccctccttgccccagagcccccaatgcgaagtcttcttctttttctccaccctcttctctatcttcgcgaccagaaggcggtacttctccttttggcgtacttttttttggccttgcggtactcctccgtcatcaccctccgtgggtcctccggtctcacttgtctagcatgatgcctatgcatatatctattagaaggatgcatacagcgagtatcattgccgaacgttccatgccaccggtgttcacaatgaagttagtcgcatttggcggtttcgacctgacttgcagacattcgaattcgaatagaacttgaaggctgcctgtgatcttcacattttgggacaggatttcggacgatctccatattttggtaaagaataggagtttggtcggccccgatgagtcgcgccgccttgcttgcctcccaggtgtcttccgtgatgtcgtcgggacgatccatgatttgctttgatctgtctccgctcctcgggtagaattccgaaaaattggctaaggggcttaagtgaacaccgttctctgtgtaagagattgttggatccgttgggctgcaccgtactgtcaactcgtacaatcttatgattgttgtagtccagctgtaaggaattgttattggtcgccgtacataggccggctgggcctacgacttcgccgaactggaaaccgcggtatgtcggtgcctttgtctttgtggattttaggtgcatcagttaggaaatgagccatgtggccgcgataaaagtattgctggccgtgtacctgtctgacttcaatgatggtgtgtacgcgagacatcagcatttcctcgacctgggttagctctggtagaaacgtagggacatccccagggtccatattattctagacaccgaataagtaaacgcgatcagcgggtttcttgatcatcgctgctttatccttcttgcgacaacgctggcaaacgcccaccgaagggcctcggactgagagctggagatcgaattcacagtgaaaattatatgacctgtctgcattttgcaagtggcaagaactgcaagagtccattccttactcgaccatgtagctatgcccgggatcgcaccggtccttttggtgaaatcgcaggcgatgcaggcgatgcaggcgatctaattgagaccgcgtcggaagacggtaggctggcaacgaacttaatacagagcctgtggaacgggattggcggaccgattatagactgtagagagccgtacggtctatgccgtctcgtgctattctggagacattccaggcaattttggtgtattgtttcaggagccgcattcgcttgaattgaaacacctggctcatgatattgtccccgattcgctcacgaaagacgtacttgggatcaagatcgggttcattgggattccaacctttttgacgtatccgggagattgacattggattcgttgccggctttttccatcttgtctgccgttttggcaattttggcggtgaaatttggccctcgtagaattctttgaaatcttatgcatcttatgcaagtgcagcaggatctaattccgggccgaaggagtagaaccggccttcgtctttcgcatggaggtggtgacatagcgaccttctcgcttgtgagtagcggctcaccgaggatgatccatttcgaggaaagagatagggaaagtggggttaatttgcaggagggagagaagcaaaccttgggagatatacctctggagaggtataatgcctggggcactaatattgaggcctgaggttaaacgcaactccactgccggttgcgcggagttggtccagtacttcttcttgcagtaaacacgggggaaaattctccgaggagggctaagtggaaaagcccttgccgtgtagtgatagtccttccttggggttcatacacatcgttgaacaagaccgtaagagagagttggagagtccaacctttctgaggaatattgtttcctcatatgtggatagaaaggcatgtcgaacattcagttcctgcatgtagcgggcaacctgccctgtaatataatatgaatacaaaaagtgtgaggtatgaggtgtggaatggaaacatgtttgaagtcaggtcatggggtatatatctgtactttaggttgccatgagaaactgaattgaagaaaaccttcctggtcattttgattgtcttttcggatgtcttctcagatatatatatcctgcgaaaagcatagactgtacacgtgattcttctttataaccttcaattggtaggcaaaaaatttttatattaagactatactgcaggcaaaatgtgatataatgccatactcctgggttcaaaggcgacggctttataaatcgaagcaaaaatgagtttaactctcatactatcacttggtagtgttgtgtaagcctttattagacttccctgctgtcttacctctctttcactcggaagtcagatctcagtttcggatatcttgtcacagacaaaagaaacaacaaggcaaattgattcattgaggggtcgagatctcgagcacgtggaaataataaagaaaaatctaaacaatgagcttcaatcgctttgagtgtctctcatagcgaggtagcatctttgaagtgtacattaggcaatgataagtctcttggtcccacataattttagatcttttcatctaattatatatttgactggacaatctctcttgatactcagatctaacgactgacatacatccacaacaatgtccccgaaacccgtgtttggcccgggccttgaagtggactacaccaacatagtccaaaccgtggagacacagattgaaactctgacatacaaggcatggcgacgccatgaagtgattgagaaactcgaaagcctgtgtcgggagctggcattccaagccacctgcgatgaacgcaagcctcgcagccatcttcttgggtacgcccaattccaacgtttttctatgacgcttagactttatttacccgaggcaatcctagtcctcacgagtgactggaccagttaccagataagtagccgggccttcgactgggtgcgagaggatgagatggaatatacggcagcttgtgtcctgaaggaggcacttcttgccgcacaatctactgactggtatctttgacatggattgtccggagtattgatttctcgatggcatattggcagaccctgattcactgcttagttattaagcagttctgacaaattcatctcaatcggcatttttcctgactcgtaataggtggtagcgcccgaaaatctctatcggggggtcgaagagaataaaggggtaggagacgaagtgtatatggcaatgtcggtgagggttgaagtttctgacttggccaaacttgaattcccagaagacaccggtatccgaaaagcctaatctgtcggaatagatatagccctctgccggggcgtagttgacaatttcaaccgacttggcatatatcctgaactgcctttgagtatcagtctctccaccggctcagtcggtcatgccgttgaattttctcggattgtctcctgttcagatctaaggtcgaacggtatcggcctctgttggaagagagtgtgacctttcgcatagtcgactgtccggacaacggtcaatcgctcagtgcttatgtattgtagtcgtcgattgaaattgtcgggcactatcttgcttgtggatcgtgaactcagcactaccagacccagtgaccaatgtctgtccaatcattcaaaaccgaagtgcgtcaaatcgtggttgatatgacctttggtgttacccctgttagacgtaggttttgtcgaaggcattgcaacctggggctttcgaagcgagagcgaggaagaataaaacaagagctagaaaatataagagtcagctgtttatatctgtgaagatgtcccaaagtagtaagagttggtgcgaacactgcgctcatgcgtaaggatcaggtcttccctcaccattttcggtcaaataagaagttagatataaccattagaagaaaatatagtaaataaaagacagtatgattgaactcctataaaagtgttaagtggcgggattgtgtctatccatgattccatacactgtgcggaaagatagggctagcggggcctcaacatagagcgagtccaactactttggcaaggagatcatttgtctgccatttcctgcagtaatgttcaagcaaaaaaaagctccatagactaactgcagatggaccagggaaatgaagtgcttgtcaaagtagttgatctcgatctaagttgattccccattcgtactaggacggtcctatattgcaataatgttagaatagaataatattaatagctccgatcaccttcatttccgaatctaagctttcttagcaaaagagaaaataactaaagaggaagccgaagaggcgagctggtttttaaatactctgccaaagggcttcgtcaccttgacaataccaatccaccgggctttttccattgtttttcttttcttcctttcgccttccgtttccctcttgtgtccactttttaatttcctcgccttcctcgttatcaggcaatagccaatggtcggatattgttcctgatctggttctcggagcggatgctggcgggctaactaaagtagcgtagccaatcggcatcgagagaagagccgggtaattacgctgcctgtgggtctgcaacagtcgcctaacccgatgcggcagtgcaatttgcgctaaggagctagctagtatatagcgtcgagtcaagcttcgcaaaacctttgcctcggactcggagatagccttagtctctccttgagtctccatagcttcggtctcaactggaacgatttgcctagcactttcggcgctaggctggactaagtatgggcaaggttctaattacagcgcgaagtggtgattcctttagcctacgctctcgcttattgacctccttaatcttgatttttcgagcagtcatggcgagtttttcattaaacttatatccactggctctctgatctccttttgtggatgttctttttagaggctaattctcacacatccatcccctcccgcgatcgtgatacttgctttacattgcgatataaagcgacattgtgcgcgtgctaggaccggaccgagcatactgcgttaacgaagacctccgacatcatgagatcctggttctcgttcctccttttgtccctgacgacgattgtcggggtcaccaatgccaccaccgaatacacggggacaacctgcaaccccctcaacaagacatgtgatgcggatccggccctcggaacagagcacacgtggctgttcaactcaactctcgacagcgatctctgggacatgcgcaccggtactctggactatacatccgaaggagccgactttatcatcaaaaccgagaacgcgtcgacgctcctcgtgtccaacttctatattttcttcggcgtgatggaagcgcacgtcaagatggccaagggggccggtattgtcagcagtgtgatcctgcaatcggacgatctcgacgagatcgactgggagtgggttggatataacacgagtggagtgcagtccgatttcttcggcaaggggaataccaccacgagtgataggggcggatatcatgcggttgcaaatgccgataccgagttccacaactatacctcgtactgggatcgagaccgcatggaatggtggattgacggtgacttggtgcggacagtgaactattccgagccgttgactgtctacggtaaaaactacccgcaaacaccgtgtcaggtcaaggttagcaactggccagttggagtcaagggacagtcgcaaggcaatctggaatggggtggtggtttggttgactgggacgatgttccgttcacgatgacggtatcgaagatccgcgttcaagacttctccactggaaaggagtacaaatacaacggaaccacgggcacctatggcagtatcgaggttgtcaggtgagttttgttctgaatcggttattcaaagaatttcggactaacttcaactcgcagtggaaactcaactgccgtgacagtaatcaacaagaaaccagagaagaccctcgcccagaaatgggctgatcttggcaatggagcgcatatcggtgtgtacgtcggtgcagctgtggctggtgcgcttatgattgccggattcggattctggtgtatgaagcagcgtcggagcggccgtctacaacgcgctttgaacgatgacgaacacaccgccgagctcacgacgttggagcagtcaaagttgagatggaggcaaagtgagttgcgtagcaagggcagctaccagccggtaccttaagggggtcagttggattgtatactatgtttcggtcatgtttattaatttaatgtagcacattgttatatatcccgtttatttagagagttcaaagccggagttcgtcgtcggtcacagcatagcatattatgtgtttgctttatcttaggtttgttcgctataaactcgaggaacttagttcgtagtagataccgatgaatcgctcggataccagacaaataaattggcacaggatagatttccggaatgcttggatgcaaaccgaagggaaaacaagccagatagttgagtcagtaacggatgtcaatccgcctaaacgaaatctggtcattggtaccccagaacagatccgatccacttgcactcgcccactcacacctatctcatcagataccatgggatgtattgggatagtatggtgactggtcaaaagagatttgtctgcttaggagaatgaagtggggcgacgatcatctcgagtcatgaggacaggctttgattgtcctagcagatggtggggccgtgtgttcttcgaatggggagctggggagcagatgtaatccggactcaagaactgaccgggagggtgacaggtcgggttggtctggggacacttgtgcagtactttggtggttgaaatagggaagtgcagacatgaaagagaatctgaccggaagtgacatgtcggctcaggtctgggcacattcgtgacgtagaggttcaactttgctactctttcaaaagtcaagcaattcatgacgcgtttggcgccattcacgccgccatcgcttcgtcgtcagaaagaatactcggtgcgctgctcacacctgaactgtcgctgtccgtcacctctgaagcccgggcacgaacctgcaaaccccagtcttggatgctggggacaccaccctcaatgacgacagggtgttcctcagcactctttcctagcacagttccagcatagcgcgactcctcgccagtcttactgtgtttcttcttcaatgcagtcaggtaatcctccttctcgacggcgtcagggtccaccatgtcaccctcgctgggcacaaagccggcaacacgtcggatttcacggtgggcggggccggtgatccagccgaggaaggcatcaagaccgcgcatatcttcttttccctgccattcctcttcccattcgcgtagttgtggtcgtatggcgcctgcgtcctgcagagcttggtagatgtcttcgaggtcgggaactgggtcgtatgggtgcgcatttgcggcatgctcggcagcagctgacgcgagaataatcagatatcgcccagtcaggtcctggatagactccaagactgaggggcgtgttgagtggaagccttgagcacggaggatttggatgattggagggcggaggagagcgttatgaaggttcgggcccgacattttgcagaatatatcggcgaagaagacagagagagtagagggacgtgaaatgaaatgtagaaaaagaaaaaagaggagtgttgaagcgtacaggcgactgagtgcgccatcggggcataaccctctcattggttaatattgccggcagtatttaacaagtacagtagctacgtcaaaagtgtagtacatcaacttgtctaccatgtatatactctccaattgtatttgatactatgcaactgtatgctgtgtagaaccagtttttttctcttcttcttttcttaacccacataatggtagtatcaaaatctttcagaaagtagtataagatataccaaaaaagacatcaaaaagacaatacataatacggagttgtaatgccatacatcgcatactaattacagccaacactagacatacctaaagtattttagcaggttgtgtcgctagatgaagattgtaaagtgatgtacaacgcgtacgacataaggtgtcccatagaatcaaaagatatatcggaatgaaaagagggatgagttctttataagcttcaagatcaaatagttacaccattatgaagtacaactaactactccgtataggtataaaattaggatacaggcctcgggaaggcggtgatttggggcggtgaggtggtatccaagagagctatcgatgccagtagcatacttagtcgcccatagaagtgtcgaagagacggagaggcgctgtgacagggttaagtgtcaagagaattgtgaaagcccatatctgatgtgccaggctttccatgccgacacgagtcatgacaaaatcactcttattctgcggtctgggctggcaatgtatgtcttcgaagggaatacagatgctaccttgaatatggtcacagcctggcgccggatccttggtgatctccatattctgcaccaggaagggaatcccatgctcgttgcttttccattgcgcaatcgtgatttttccctgcagtacttcgatactgagtacaacgttcacttctccgttgctttggttgagccaaaacatcatgtcgtcctcgagctttgttggtatctcctcgcatgctacctcaactgccatgctaggccatttggtgccaaaaatgagtcggcctccaggaacaatcggccctcttgatccgccctgaattgcctcggactgatgttgaacccataggaaggagcatataatctttctccactatttaattccaacattcgaccatgccgaagaaagaaccgattgccactgaatgtgctccagtctcgagtctgataagagcatggccaatggaagggtcgtagctctcgcatgattgtgcgaacagattttcttcaacattcatattatcaaggaaggaacgctcatccataataaaaatagtataagggttagataactctgtatcctgtctatgtcgctccagttcctggtctagaatttgaagagcatcctcaattcccttaaactcatattttggggtcgtagaaggaaggccgtgttcaaacatgatggatgtgaaatgtgagagaaatttcaatggattgtaagagaagttatagtccttcagacgccaaaatgacacaatagttagttagttaactaggatggacatggtgcctattatgtaaatgtgcggtaaccgccccggtggaacctcacctcctcacttcctccactcaccttactcaccttacccttgctaccaggtatcatcatattgcgactatgccgcctttaaaaatcaaattctccaggaggccagatccgccagaagaaccagcgcctatacctgcgcccgtgcctgcacctgcgcctgcacctgcgcctgctcccccagccgaaactccccaagccccccgcaagatcacactcaagatcgcacgaaaaccacaacctgagagtgaagaaaaaccaaagaagaagaagtcaacaaagaagcgaccagccgaaactgccgcacttcctgagcttgagcacgaacccgaaccggagacgagccagcaaatccccaagcggataaagctgatcccatccaagaagcctgctttgcagtcaatccgcatcaaaaataaaggaatcgttcccaaccgaccagtaggtgttgggtatgactccgaagcctcggacaccgaacttgatccgtccatcgaagaacaattcatcttacggatgctccccggagaggactgcgatattataaggaaagtaatcaacgacaggacattcaagaatggcgacgtcgggatcaaacccctcacacgggagggccggcgctctatcgtgaatgttcggggccaccaatatgcggcagctctcgtggatctaccctgcatcatcgagggcatgaagagctgggaccgacgaggctggtacaagtcagcagatatctgtcaaatgctcttagttctgggacgcgtcaacagtgaccaagaagctatggaatacccactccccccgggcgttgactctcccgatgaaaagacacttcaatacgcacacggtatcgcaccacccctccgttgggttcgcaagcggcgtttccgcgaccgcgtcagcacccgcacgatcgaacaagttgaaaaggccgtggaagaactcatggcccaggacgacaattcgattttccctcccaagttcgagttggtggacagcacatccctgaatcgcgtcgagggcttggtacaatcgggaggctacggggatgaatacgacgatgagcaggatgcatacggtgaagcggaagaagagatgatggacgacttcgaggatgcgcttgctgccgagatggaagcggcattggctgccggggatgatgaggcaccgggagcacccgagcaggcacacactacgtcccagtcgttcacaccagctggaggaccgaccgaacgcggcgacacctctgcagatgagagcaacatatccgacgaggacgaggaagatgagctggatgacgaccaaatcgagcagcaacaacagctccagcagcagcgcgaggaagtcgccgagctggaagctctcatcaaaaccgagaccgcacagtgggagaaggtgcaaaatcatattttgcgcaacaagatgggccgacggatccaggaactaaagaaggacctacaactgaagaaggtctctatgggcatgccagccggggacgatatctgagctcctgtttcacatcctatgtccaatgggattttcggcgttaccatttcataatcatacccagtttgtccgaccgaatgcgagtgcggtctctatgttgatacaagcagccttagctagctcgaaataatgaaagttatgtccaaacattaacaaccagataaatcacgctccttccatcgccactctaagatcgagataggtactttcaatacctatttactccgcacttaccaccggatcaccagtagcctctttaaccgcctcctccacatccaacttctcatcccgttccaacttctctcgcctgacagcctccctctccgcaacctccgcatccgccccaggctcacccggactgctcccaaccctctcaccaagaatgcgatcatgctcagctctcttcgatcccaaattcgccgccagatcatctgcttccccgaaaccaggatggccaggcccacccgcactcccaacagggccagcatgagcaccggcctgcgcgcgctgcatccccatccccttccgctgaactgcgtccgcgatatacccctccgcgggctgctcctcgacgccgtattctaaatcgacgtccggcgcattgtggagttcctgttcgtgttgctggtgctgtgcgctcagacgggctcgtgcttcgtcgcttgagggctgggactctgctgtacgtttaattaccccgatcgtgtcgccgtgttgtcggcttgtttcggtccctgctcgttgctcttgtggcgtgtgtgagacgggattcgaggactgcgcgtaggcggcttgtttggggggttgggcggtttgggcggcggtttgggagcgggtctgcatggtgatacaatgggatctagatttatgtttcggatattggatatggtcaaggggtaagaggttaaggagtatgaagtaagtatagctcaagagctggataaccggctgaagaaagtgacagctgagtacccacttgtgacgtcagcgtcttcgaccaatgagagcgcgtggaagtacaaccctaaggatagtcgcgacaagatttggttggctcaatggttcggagtagtcttgttagatgtcttttgtgtatagatctctttcccctttcttcgtcttaagacagacggtagagaaagtcaaaaaatgcttgatttagtcttccatgtataacttgaatccactctacaacataaggggtaaatcaactgcacaaagtactttgtcctcggcacttctggactaactcaataagtgcgacccagcaaggctaccgaatcaacgacaatcgccttattctgcacagatcgtcgtattgtcccaaactgtcgggactccaagcccccaacacgaacagtatcagtatctcatcccgtctacccccgtccatgtggcgccactaccacctgcttctagactaactccaactgtaatccaagtaattcaactaatcagactaatcagaccgccccggaagtatgtcacccaaccccctaacccacttcgacaccgtccgaggcatgaattggggtgaggggaacattgtgtgacccagtccctccccactcgttttctcgcgatgttcttctcctatctttcacataggctgaacgcagaaccctctcggtatctcactcatggctcagcaactctactatctgccgcgcggctcgcgcatcctggtcaccggcgcgaacggcttcattgggagcaatgtcgttcacagtctgcttgaactaggctacaaggttcgcgggactgtccgcgcaccgaaaccatggctcgatgagatgttccgcgggaagttcgggcgggactcgtatgagtctgttgttcttactaactttgagaacgtggatactcttgttagtgtaatggatggtgtgtctggcgtggcgcatgtggtatgtatttggcagtggaattattcgatgggtatgtgctaatgagacattgcgctgtgtaggcatcagatgttagcttcagtgcgaatccggaagaggttgtgccgtgggtgttgagagctgttcataatgtgctagaggctgcatcgagaaattccgctatccggcgggttgtcatgacctcttctgcggtcacggcgttgtttccggagccgaataaggagggtgttgttgttcgtgagggtgagagaccacttcttagagaagggaatgcaaggatgtattggttaatattgtatctagactcctggaatgacgaggctaccaagctagcctatgattcggatgctccaccacttgtgaagggcctttacacttatgctgcctccaagaccgagggagagaaggcagcgtggagatggatggagaagaacaagccaggcttccaattcaataccgtgttaccggattttaccgtgagttctatgccaggccatcaaacgtatgatattgacttcgattagctcgggagaatcctacatgaacagatccacggctcgacaatgggctgggttactggcctacccaaaggtgacacacgtatttttgagacatttgtgccgcgtaagttgacactgcttgattgttcgatcattgctgatataaaaagaatacttctgcgatgttatcgatattgcgcgtctacatgtggcggccctcctcgacccaaatacagtctcccgtcgactcttcggatttgcagctccgatcaacctcactgatataatctcagtcgttcgaaagctccagcctaataatacattgattcctgaacctcctgttaacgagggccgtgatctgagtgaggtaatcccggctaaggacgcagaaaggctcctacgggaattctgtgggcgaaaagggtggacttcgttggaggatagtattgcccagggacttgaggtatctcgaaggccgttgtgttctttatagcgtcccattgatttcgcaaatacaataagaaatcttcaagttgttgagcagcaatagtgcagaacaggtgacattctcccgagatctcactctgcagtttccgactttccacagactgctggtgccatctttctcgctttcttcgccgtcaaaggtgttgaagtattctcttgagacaatttgtaggcattttggctgcgtgcaacacgcccgactgttgacttcgagagtcctctatcgacactagccgcaatagcagcccagctgggtcgatcatctttcctcaccaagcgcgcagtataacgcgcagtttgatcactcaacttagaagggcgtcttcgtccgggctttgaagacatatctttgcgttcttgaaaacgcgttttcgtacagtaaacagtggatcgcgcgacgcgaagatctttggcaattttgatggctgaattcccattttgaagggctttgataattgctgcacgtgttatttctgataactcgcttggagccggctttttggcttttgttgattgagacgtggtgaagtatcgttgcaaagagacgtaattccaccgtcacctacttgccgacatcctgaccgaagagaatcagttacctcggcaaaccgaacatctacatgtaagaccaaaatgtattcaaaccaggcttgaatatcagtccttcctattagaaaaacaaaaaggcgtggttaaagtgtaataaaccattgtgaatatcggcagatctacccctcaacaagaaccactcccatcaatggcagattccacacctacgctacagcaagctgcggtggtgcaaaacccaggagaaaatgcaactatcactcttcagaatgacatacccgtcgcaagtcctggacaaaatgaagttctcgtcaaattaacttgcaccggcctgtggtaagcgcttacattccgaaatgaattcaccctcgaaaaactaacccataaccatcaaaaaagccgctcagaactccgcgctgttttagcctggggtgcatacaactccatcatcggccacgaaggggtcggaattgtagtaaaagcagggcccgatgtctcggagtcccttctcggtgaacgagtcggcgtcaaatggctctacagtgcatgcaacaaatgctcggtctgcaagcgagggttcccgaactattgcgcacagcagctcaatacaagtcgccatgttccggggacattgcagcagtatgttatcgccgatgcgcggttcctgacattgatccccgggggcgtagccgatgaagttgcagcaccgctactgtgcgctggacttacgatggttggtgctttgtcgaaacttgatcatgagctgcaggtgggtgactttattgttatttcggggtctgggggaggtttgggccatattggggtgcagattgcatccaggatcaaaaatttgcgggttattgcggttgatagcggtgatgataagagagctttgagtttggagtctggggcggaggttttctttgattacaagactgaagatgtggttgctcgagtgcgtgagttcactggggagggtgcgcatgcgacaatcgtcgtgccgggtacgaaggaagcattgcagatggcgcctaacctggtgagaaacatggggtttgttgtgaatgttgggttgccaccgaatgacttggatattcctctttcggctacactttgcacagcgagaggtaagatgacggtggtctcatagtcaatcatatactaactctcacaacgataggtctcacctttatagggtcatctgtgggtacggaggatcaattgaccgacttactgcaagctgcagctgctggaaaaatcgcaccatcgatcgaagtctttgaattctcggacgtgccgactttgatagagaagctgagggatgatggtattatgggacgcgcagtgatcactttgccacagtaacttgacattccatgtttcaattttaagcaaattgacaagagagcaaaggcgagaagagaagggttgttgtattcttattcctggtcacacttctacagctacctagtcatgaaaatatattcccataaagacatcgtagtgttaccagaggtataacgtccctaactaattaacatcttggagtcaggccaggtcattaaagtcttacgttcagtaacgtagctttgtatatataacgaccagatcattcccagttctcctgtcagacaacttgaccacccctgctccgggtgtcaaaacctgaacccaaccaacctacttcttgatgatctggaggaccggtgatgatactggagcaatccaacaatgaattgattccggcagacgttgttctcgtctactggatgatgaaacaattaatctcaatgagtggcttgtatacttgtaaaaataagttctagctcatatccactgagccaacggtcgtcccaaccgtcactacctccattgacggactgccttatgaatctcatgaatttgctttgacctagagaccggtatcctgcccattcatatatgggaatagttgggatgcttgtatatcttcttcgtcggtatagtcatacagagcaggacaccaaatccatggcttggtaaggtgactggcattataggctttgatcatatctgcccgaaagttgtcttgctggcttgtgtcgcgattcccgttgcctgtgcctttgatagccatgcccggggggattatgagctcattgctcataatcttccacctctattccattccaagcttcgatcatgccggtgaaacaaccgatgattgttgcatgtgctttagtctccattctgacgacaagtttgttgatggaaggatcatagagcttgcaggattcattgtgtcatggtgattattccccgtttttgtactttgatgctgagtacaacaccaacttctcagttgcttgcgttcagccaaaagattataacttccacaggttttgcttgtgcttctgaacaggctacctcccttgaaattcttcacggtttgagtctagaatcttggctgtatccatcttctggactgggaagcaattccacgccctgtccggccctccactattatctttcccttgacttgtccgttactttcattaagagaagcctgacatccttctcaagcttcgcccgtgatttaggtgaagatggggagagaagtaagaagtgggaatcaatccgggagggtttatatagctcttcagaggtcatatgaacttgtgctttagtctaacctaccccggccaacgaagttaggtaccgttcgtatgttataccaatacaaaaggtactttcttataccatatatacggcacctaagtaagacttcttgatttttttttggcatgcaatattgactaatggtaaataggcggctaggcctccggatactaaggtaaccttggaagtatcgtagcgaccgccttcgccttccatatcgaatacatacagatatacaaaagaatatgaggaaaaatgggaagaaggattactgcccatggaccacgtgtactgggcgaaattcaaaattcataaataatgagcacaaactgagattatcgttgcccgcgccaacaccaggaaggtgtgctgggcgcttggcagattccttcgaaggacgctatgcaccgcgagagcagtgacatcagctccgatccccgattcctcccctctccaactccgtaattcaccatggtttacgcatttatcctcccaaccgtctcgcctctatcatttcaatcattcatctcctctgccactcatccatccctcccccaatcagccacaacaacccgccatgcactccgcctcgcattgaaggcccacaagcgcctaccccgcggcccgcgccaggatgcccacctacccgccgttctgtccgccttgaacgaatacatccccttcctgttcgcaatctcaaacggactgaatggtcgctctgttacagcgaattcccaagacggctacacgacagggggaacgaatatccgcgccgaagtagtcgacatcacagcccatgcggagatagagtcgacatggagatatacgctgtcatcctcaggcgggttgaatttcgggcccgggggaaataacacaagcggaaacggtatccgcacgcggaatggacgagtctctggccgcggcatccacttcgaattggcgtttacgctcacaacgctcggttacgtactgagtaggatggcgcgcgcaggagtcgtcgctacgttatacgcaccgtctaccccgtccgcggagactcgtacggctgctgtccagactgcgacacggtatctcttacaagctagctcggtgcataatctgctcgcgtcctcgccgactttcaccgcagctactgtgtcgacggtaccggagctcgagtctggtacgcagtctgctttgtcgtctctggccatggcggaggctacattactggctgtccttaaagatgatgcgtatgttgcggcgtgtatccaatcgcgcaatccgaatgataaagagtggatggtccgtgcacctgagataccgaaggtacgcgctctgctatttgcaagactatgtgttcgtgccgcagagtacgccgaacaagcggcggcaggtctaggtgcagttggatctacgtctggtcgtgcaggccgtgtggatgaggatttggtccgctataccggagtcttggctcgcgttgcccgagcacgcgcctgtcgattctttggtgtggatgcggagctatcaggcaaagtcggtgagggtattgcgtggttgcgagctgcacgcactccactgggcctacgtggagcagggtctcaggaagacactactgggtcaggaggctctgcaaagggtggactatcccgtttaaagcgagaatggacagagcggcgtgaggagcgtcgagttactaaggatgctggcggtagtcgcagcgacaaaggtccattggatgcgggagatgatgctggccgtgatgaggagggacgagtcctcgcgatgcttgagacgaattgggtgaaaatgaatgacacagtaagtttgaattctttacgtcactctagcccaagtgagacttaatatgtatgacttcctgacccgatgcagatgaacacgcagatcattccaccatctgcaccattgctctctaatctgccttctgggcgtgatatccactctcccccggcaccataccagcccccttctttagatgacgatcaactcatgcggatgcgtgccccaccagatgagagagatgacgttcaattcggaagtgacgacgatagtgaagacgatgcaggacaacctgatagtcgtgaacctccgggtgcattcccggaccggagtgcgacagtctcgaccgtttattattgaatacggatatataagtacatataagtacatagcatgagatacggtgattataccgaagttagcatttacttggcggtccaaggacaacaggtgcccgctaaggatacattgggatatgaggccgtgtgtgggtctttactacgaccatgaacatcgtagaagaaaaaagaagatcaaacaaagtgatattatgtacagtacagtcggacaagagcatagagggtaatctccagacctcttctgccatcttttcgtctcccctccgacacggacccgatctaggtggctataagatcaagattggacaggatcggatcgaaaccacgagatttccgtccaaagctgatcatttcatctcgatatcaattgtagaatccccgcggtgtcgatatcaatcatcaaacccgagcctcgaaacgcaatcgcatagctcaacacacaaaagatgtaaacgcttattccggctgtccaccgaagcggttcttctccatgccgaggtaacccctaatcttgctctccttgaggagctcgaagtacttgtctgcaaaagatatataggtcagtacaacgcatcgcaatcaataccaatccaatccaatccgcatagcccacaatccagtcagatcagggtatttcgtagacaaatccagaacaccgaatctcctggatatagcctagacaggacacagaatacggaaacaacccacctcggtaaacaccacacttctcaaggtggttcacgccctcgcgcgcatagcacttgcccaattcctcgccgacgagacgcgccatcatgctgcggacccactgctcacggataatggcatcgcgggcgttgtggagtgcgacgttgtcctcgaagtcgacgccttcgtaggtcggggcgacagtgggcttcttggcgaggaaggcggcggactcggcggtgggcattgtgggtggttggtttatggggattgcgttgaggtggggttttgctggggttgttgcttgctcgggcgctgggcagtgacggcaagggttgggagagtgttctcttgaaagctgcttgatgcggtcgtcggcacgttgatcttgaaggttggattacgtgggttgtgattgggtggatggagggcggtcagggtggtgtggtgcgggagagggagaagaccttctgcgcagatctgaaggtcacgtgaatctatacaatctgcaaacggcaggacagagtgagcgaggtttggataagattgaatttttatgtggcttagaggaactaggcactattatgttcagtgaagaaatgacttgcgaaaatatcatattttcaatgaccgtggttgatcaagataatgcggcattactaaaacgatacatacatacaaaacaaaaactttaacacaagacctcctatgatgcgaggcatgaccacatggatgcaaacctgccgtggaatatatgtgatgtgaatggcataaaacagtaaggttcactcatccccatccacaaccttccccgtcatttggtcgtatagatcaactacactatctctcaatcgctcccaaccagaccggccaagccaattgctcagttcgcgatagtagtagatttccgaccagcaatcacgaccaaacatacacccagccatgttaacgacgaggtcgtgtgctgcctgctgatagtgaacgactggattctctccgtcgccgcatgcgccaggagggaaggaattgatgctgcgttgtggtaaaaagccaacaccgctccggacccatggttggctctgatatatgtactccagagcatcttgttctttgtgctcccattccatgtgcatctgctcgtacatgacgggatcccaccagacatcgagcagccgttcggtccaaagagaccgtcgcaggaagaaagatccgagattgaagccggagcagtcttgtgtcaggagcatattcaaagaatctgcctggccatcgccctcgcgagaacgaccgagctcatcgagccagaactcgggtagtggatgggtgatgttgatagggttataggcattgatatcacggtagacgtgtgacttgaggtcattgaatatatggtgttggagagatgtgtcgtactccatgacccaggtgttcaagtcgagccaccaaaaccactctgcgtctggatacttgcgcatggctttgcgaatcacatcgcctttctcccagctctcgcgccattcatgtgaatatcgcttcttggccagcaaattggccagctcgagctcgtagccccattttttcgcatatctcttcttgttccatatgctgttgcgctcaatggcccattcacgggcacccttccactccatgacgcctccctctacgttggatccgagtatgatgacgaacttgctcccgccgcctataggcgaccttcggtatgtttggacaatagctataatgcggtcagagtggcacgtcgaaatgatatggaattagcaatcacttactcgcccagcaaaacatatagccgatccacaccaagaacagcgccaataatagccggaaccgaccccggcgcactggtatgcgtaatgcgcctagcagaccacgcccactacccggacgattccattcccgaccataatcatccttgtcgacgtatccctgcgacgaaagtcttctcaagctaggaaatcgagcgaagatcttgtgtcgttgtcgagagaagaagccgctattgcgtgttgagaatgatggataccggtacacctcctcgctctttgccttggcttcagcccatgaaacgctgcctggtgtgcctggcagtaatgaaccggacgatggtttattcggcgatgtgctgccgctgcccggaacgagtcccgggctggaccaccccccgcccgcgtggggagagggcgaccgcgataaggtcatcgcaatgatcggcgccgaatagttgtgtgctagagatcgatcgctgtgaaatcttgaggccatcgaccggagagtaatttcgtaattgcgagcgaagggggttaattcgttgtgaggtcagagtgacagacaggacgagtgggatgaaattaggaaagaagagagttggcagttaagatacacaacacaattcaccgtggggacattatacaccggattcgagatgcgaggaacttgaggccgaatgcggcatgtctgtgctgattgcatggcattggagcaggtgcgggctgactttcggtgtttcccagcgttgaagttgggaaattgggttttgatctcgcgttagtgtcaatactcgtaaaccgaattattcccaggggtcaatgactcctgctgtatagttgacatacagtttaagtctaatttaacctacgagctactcaatcaagcggagatcaatttgcggagcgcggagatcggctccacattcctacatctactcgaccgcttgcggacaaagaccattgtggagtacagaaacaattaatatcatgcggaccacgcaattactatctatgaccaaagcggaaagactaataaaaccaaatctcaatctacttccgatccttgcattgggactgaatcggcattcgattcgtcgtcctgtcggccttgctcatgagagcttgtcgcaccatgaaaccggcttcaggtccaggccggggctgggcgctctcaccatgggtaaattcgcactggagcttgaggaacttcgttctgtctttgttttggtacacagtgataatgtcgccggtgtagagtttcccgaattgtaaagcctcaggaccatcctcggtcatagagccgcggcgcaggagtgtatcattcacccagatgccaagacgcgctttggtggagagaatagccataaccccggggatatcgagccagctttcacctgttgcgatcctcgcctcgattcctggagtccaaaatgtgacctctagtgcataggcggggatcctagtgtccatggaatcagcatgcttgacggtcgcggacggcccgcgaccccaggaggtgagcctatcctcaaggtagattgtcaagtcgaatatcgaaccgggaaggctcttcagtttgccatatcgttttggtggtttggcaaactcggggtcatagagagtggaaggaatagggggtgagttgggtctatgaacaatcggttctgacgagtctgcttcctcgacacagacccgatccaagatagcttggcctgtctgcgcatcgagggtagtagcaaactcaacgtcgtattctgatttcgagggacgagaggggtagttgggagtagtgtcgcggtggctgttgtggtcactattatcgctagatgcctcgctggctgtgtcagggattgcaagagtgaggtcaatccgacgtgtgaacttcgctttgggggttgcctcctgtggactcgagacagattctgccttagggctcgaagtcggcggaagagaatcctttttcgggctactagatagtgtctcgcccttggtgtgtccaggaggggtctgccgcaaggaggatctgttaaccgggccacccttaagttgcggagtggggttcaaggaattcatgttgagttgcccaacgagtttctctgcacccatcaaactgggtgcagtgccaccgaagggtaccgccgggagggaaatgatcgactcgttgggatcgtcgctcatcatcgactcaccggaagagagaaagtcaacgtgaaaattattggcgttgaaggcctggatattgccgagtgcgtgggagctccgtagagccgagggggtaatttcgccaaacaaacgtttggcactattgtccactaccgcttgtccatcttggaagctctcaatatttggaaggctgggatagtgtacatcagtcggaatgtactgggtacgggggcgtttggagattgcttcgctgccgctactctcctcgccgtcggcttcatggacgtagcccggaccgtcagcgatagacaactgtgaagcgtctagctcgtcctcgggatcctcgccaatgattgaaagccgatcttgataatcatatagcaagtcgtcatcatcctcatactcatccacatcaggcacctcggagatccaagggtgctggaaacacttcttctctgtcgggcgtgagaaaggatcgcgattgagaagctgggcgacgaaatcgattccagcctcagacacgcctgccgtgcgtaatgcatcgaaatcagcgtcgcttgtcatgatggtgcgaagcatctggagacctcgatcttctgcacgccctgagaatgggggaacgccggcgaggatatggaaaaggactgctcctagcgaccacatgtcaacggattggctgtatggggatgttctggggggtcttttaacgtcagcagaggcttctcaagcgaaaggaaataagtgacttacgggtctccaacgcgacgcctctttcggagctcgccacggcggtattgatcataatctgggtaaacttccggcgcgcagtatagaagggttccacaaaaagtttttaggaaagtctcctgctccaccactttcgacagcccaaagtccgatagcttaattctgagcgggtccaacgaggcaatcaggatgttgtccggtttgatatctcgatgggtgatgtggcgtttatgcaaatagtgaagcgctcgcaacacttgtcgtgcgatcgttctaaccatttcctcgggaattctctcctgcgtgtgcaggtatgtcgacagctcgccgcctggaacatactccatgatgatgtagatccatcgatcatgctcgtgatgatcgatgtattgaacaatattcggctgcaacacgttagttctatagttaacatgcaatcttaaacatattgcttacatgtctgagatctctcataatcttcatctcattgtcgaccttctgatcaaggataccgtttttcatgaagcgacgcttgtcgagttctttcgcagcatagatggcgccatgttgtttggttgcgatcttgtacacagtagcaaaggcgccctttccaatctgtccagtcacgttgtacatggcaccaccggtccaatgcatgccataagcgttggcggatgaccacgctagagcagacgggcttgggccctgtcgctctttatgggccggagcatgtgcatgaactcgttcgaaatagcgaaacaagttctggtgatagtggactgcgaatccttctcgtaatgggattcgaaccacgaaccggacctcgtcggagttttggcagccggtaacaacttgaatgacagatccattcgtgagcattcgactattcccatccttctgagattttcgtaggcggcaattgtccacaatggtaccatttgtcgacgtatcttgcagcatgagaatgccgtcctcggtaagatatatgcgaaaatggttatttgacactcgtttggcattatcatcgacactcagaagaatatcacaacgagaccgattgcgaccgaagcaaaatcccagtcccaggttatgaacttttgacgagagcctcaacgccaaatctaatgatgcagtgtgagaggagtcgtgccctagtatgtccctttggaggatatgttgaggacatattccgccagtggcactgacagcatcatgggcagcatgcgaattcggatgaaggatacagataatgtcggccaggtcttgatcttggatgccggagttattcattcccattcggcgaggatcagcacatggctgcgtggattcctgggtggcttccattatgagggtgaatgcaagtgtaaatgaaggtgctaggggaatgaacacagaaatgagctacgggtacggatccgatggagtagggtatatgtgctgcgctgccagcaaggggaatgtgcataaaaaggtcattaaaatgtcgtagactagatatatgatgtgtcagtggttttgcgccaacagcgaaagctcggagagggtttgtatatacctcgagggaatgaatgctagggccggggagccgcacacccgggcaaaagttggacaagacaatgaatgatatgtacgcttcaggaccaatgatacaatcaccagggtatgtgtcgcctcagcaacagattgcccacgaacgttttgcttggtgatcgcaaggagtggaaataggcaatcagatgagcatgagcgataagtgaaccgtgtgccttgcagagtggggagtccctcttcagctcttctcgaagctagcgttgatcaacacagatgatgaatgatgcacatgagacaaaagcgagacttcaagccctcgtctgcatgtcataagaatacgaatcttgattatggggttgcagatgtcgaccggcgcagaccgtcaaatgccgtttaatgagaagctaccgaatgctgtttccgtattaaatgctcgaattagggattttaagcgtcgattttgagagggccaggaggtatgtctgtggaatccagttttaacaagttagcaaacgtcctttagaagcttgaagaggcatttgtttagccccgactcgagatcgagaatgaacgcacacagcctgaaatatccccgatcaatctgtccgcgggtagcaaaattgggacagtagatagataaaaacggggacgccgggacagagcaaaattgcactcctgggaaggtcgtcgtccgaggaacaagaccaggaacgagccgcaacaatcgtgactcggtacctgaggcaacgacgcgttcctaaggcgcgtaaccccttactcatcaggcaacagagccgttgattggccgagtatgtgagaggggttaaccactcaagttcgatctatgaaatacagtgtacacgataccattatgaagtatggctatagattcgttattatttacgtcaaactatttacttccatacggcttgctagtgtcttcactccgtttgaaatcacccttcagcgcagtgtcgaacacttgctccagccgtgcgagcgcttcgtccgatacctctgtgacaggtcagattttcagtcatgcatgctcagccctgaagcagactacccaggtaaggaaccacttacggtaatggaccacaacgcggccacccaacaatctcagccctttctgctgtccaatctctgccaagtcattcggccccactcctgatgcttcgagatccaaccaaaccatattggtgtgcagggggtactctagcttgccaccgcgactggtccacagatcggctacccgtttcgcctttgtatgggttgctgcaagcttcccggtctggccgttggggtccgtgccaaaagtttcggtgagcgcaacgcgggcggcagctgcaatcacgccagtctgtcgagcgccgccgccgatagatttgcggaaccagcgcgctttcttgataaactctcgggagccgacaatgatacttccaataggtgcccccagccccttcgagaagcaaagactaacgctatcgaagatgcttgcatattcaggcaagctcccagcaccggccgcgacggcttcccacagccgagcaccgtccaagtgaaccttgatgtcatgagcatgagcccattccacgatccgcttcgcctcagccagcggcatgatcatcccatcgagagtattctctagactgatcaacttggtggggcaataatgaatattatcaccgagaactgcgtgctttttgacgtcttccaaagtcaaatgcaccccattcttaggaatgacagtgctcacggtggcgccagtccaagcactcacaccaccagcctcataacagatgatatgtgatcgatgatcacacaatactgaatgaggtggctgcgcgagatgcgagcgaatggctacctggtttcccatggtacccgaaagaaccaatagactgtcttcatgtttggtaaaatcagccacgtagctttgcagctcgttggtgactggatcctcgttgaagacatcatccagaagagttgtctggcagatcgcttcgagcatcgacgctgtaggcttcgtcattgtatcgcctgaccaaaatcagcttcaattctgtcatccttttccgatttagtcatacttcggaggtcgaactcagcggctccagccccatgccaggctgtagtcttcttatcactgctaccaatgaccgccgaggcacgagccagggcatccgttgagagttgtgccatagcaattggaaagatttttcgaccgtgcggggctgtcaatcgaaacgccgaggaagagcaacggatcggatgtaacaagcgattcatggatgagctttatgacagtaaccgcagatacctgttgagggaattgggaaagaggggagtcgccacgtgatccggagacagatagctcgctacattgtggaaccgggatggatctcatcctcatctgtacagcatgttgcagcggtggtcggagggtaattatattcataagcccggtgctgatacaacctgaaccttgcgttccatccatcagaagtgtacaatctgtagctccatgcctccgcggctatgacgacaccgttcttacacagtccttatcgataccccaattcggcctagtgcatccaacggtcggcctcgaccgctgactcagcaatgtgcttggttgcgggcaatgcgcttgactggttcaagtccgcacaatcttacaagactctgattgcttacactaggcactgcttacactgggcacaatgatggacctatcccatctcacacggcctggcattctgtgccagtgtgctcgatgttccagctcactggctgcactggagaatgagtgggccaaactatctaatgcctactcaatcccgacagcatggctgagtgtcgacctccatcgcatcgcggtttcttcggagcggaagcaaatccctcatacatcggatatgacccttctgcgtggccgtgtcattcaagaagtgtcatgtaaactctgccagcaaaggatgggggtactttgtccacttgacaacgggtaagtggctgtcgatcaagaccggggcttctcatagctaatcttcttttaggatgaatattttgtggaaaatgtcgaaagttgcttttagggagattgttaccatgcgaacggtgcagcctgtattcaaacagggggccctcgaacgactgatttgtcccccgaaagaacctccgcgccgaaacaccgatcttgtccagggaaatgcagtggtcccagctggctccaccgatcccactaccgtcgatccagcgatgcaaaaacaaatgatccaccagggtagaagtatcgatcagatttcgaactcagtgaaccacctccaagatacaatgtctgatctcaaaaactcatttacagcccttcgaattgagttgaatcgacccggacggaatttggcggaaggttccatacttcaggggcaagactttgacatgattgctatggtgctcaaggagctcaaatccaagtctgacgagatcgagaaactcaagctggagatcgaggccctgaaactgaagaatcgctatatgggagtgaccctgccacaccagcaagagtcattgtcgatcatgaacatgaatgctgcgcttcctgaagtccggagccccggcttactccaagcgggccggaaacgcaattggcctgacgcattctcgggcgatcgcagccagacaatcgcggattccccggaggaagatgatatggtggatgaaatgtctctatcagatccgctgataaagagctctcgcattcctctcaatgaccaaccccaaccagcaattatcaatggtccacctggtgaagagcaactggagtccctagaggggctgatgtctgctcgagaacctgaaaatatctccatccctcttcaaccccaatccaacttgcagcaaactatagccaaacgtccgcgcctaggtgtgcctttcgaggaaagcccccaaacggcccctccgcagccgcaaactgttcctcagaaaagaccgcctggcaggccgaggaaatcaatcagccagcccactatccccgatctcaccgaatcacccagtatcgctccttctaccacgcaggggaatgtggagtcaaacgttcaacaaaacacagtacgacgtcgcacgtctcgtcgcagcttgcgtgcgcaatcccttggtccaaataacagccatgcacatagtgaagaggaccagcagaacacacaagagtcaactgaagctccccctgaggctcacccagcgcccaacaaaaagaccaagcggaatactggctcccccaatggaaagcgaactggcggtccagacgaggacggagatgaggccgctatgaatgagaagcggaaggctaaggtcgcggcgcgggacgtcatggccaagatggctttacagcacgaggaggctttggaggctgagaatgcatgataaatcgccagcacttatcactcacagacttgtacattagacaataaaccacacataacgtatcatgaccaaagcttcaactgagaccggctgataataaagtctgtgcgcgccctcgtatacacctagaacggctcttatataaagccctagtaaattggaccaagtatctagctcacttcttcctactctgattgagagatcaacgtgataaactttcttgttcaaagccacagtatatcagtaaagtcgaaacttggatttgctaacctatgcggatatcccctaacgcagtatcatatcataacctcataaaaatcattattttcagtctgtgatgtcccagagaatcttgcgagtgtcactagcgagtcgggataaagtgcttggaactggcctcttgttcgctgaatgattcagggaatgctgcgataccaccaatgatgccaatagccatgaaagcaagagaaatgagagaccagatgactccccagcactgggaagatccaccgtatctcttagcaaagacgctggcatcggagctgtttactttgcgaaggatgagatcgtcgcactggagcacatcttgttagccacataagtcaattgagtgcaactggtacttacaatatcccagacactgtacaatgcagacatgacaccaatgaacagctatagagaaaagcaggttagttcaagttcatgacgggtgaatcataggacaacataccacgacccagcgcaaggcttcaccgtggacaatgaaccagcatgccaccaacaatccgaccgcgagaagaatagttacgatagtcaaccagtctctccgcgcccaccaaagggtaagcagaaagcatacaccgaggacgaaactagcaaccttgcttgcgacaatatcaaatccagcgaagatcaacagagccccgataatcgaagaccccaggtacccagcaggcaaagtgatggcactcataccgccttgcatatgggtaacgccgccttcatttggatccagcgagatagacttgacttttccaccagtacagcaggcagtaatcgcatggccgaattcatggaaggcaatcaccagcatctgtgcagtaggttagtcacagtccgtcaatatggggctgggagtatttaccttgaacggccatagtacccagcggacatatggtagattccatagtagtgcgatgaccaccacatacactgccattatccccaaggtgacggcttgggtatggttgacacttaagccacgccgggccagttggtgcggggccgtttccaccgcgctttgggctagcgctgcatatagggctggcatggtgagcgataaacaggctccgtaaatgagaaagagggagatgcagatgttgaaatgacggaggaagcgtaagtgcagaatatttaatggtcagctaatattcgagagatcatccgcgcgtccatagggccgcgcatgccagcagccacttgttttgttttgtggctgatctcccttgggctatttttagtggcttggccttttaggctgaagggtttcacctttacgtcttcagtctatcaacatattgaaatgatattcattacaattagcatacattcaattcgctatgttctttaatccatatgggagatgatttaactgaaaatcaatacgagagggttgcacctgccatctgagttaggttatatatagtgaggttgtgaggaagtcacgtttgacaagctaaatgtttctgaataggcaatatattattcgctgctctttatccattcaccattcattcaatctcaaccgctaatcccacagacagaatgagttgtctaggacgcagaacattgagatggtggttcacgatgttgagtcttcgacggcagtcccccggctcgcggcatcgagaccgtctccgagaagagctatgcgagcgtcgacacgcagagacaagttggcaaaagcttagtgagacatcagatgtccttttctcaataacccgggcccaatacgacgggtttccaacacggaatccttcttgcttgtacagcctccatctcagcccgatctacatgtacatggttgcaaagtacacgtcacgatggtccttcttcgaagcagccgccctcttctgcaatgcccggcactggaatcttgtgcatgaggtcgtgaacccaagcaaggatcacaaactcatagaagtcgctacccgccatgacattgaccacacggagttccagcgggtgagccgtcagcttcgtatttggccactgcttccatgaatcacaagtcatgattccggaatagtccatagcgtagctgtatgtttgctgcttagattatgtgacatacgttacgagtcaattcactttctccgtttctctttgcccctcgataacaggctcagctttaattcacctcagaaaaggtttttatcattaaagcttactggatcaggtctgaccttcccttttaagtaccacattttcccatctacgataaagttcaatcttccttgaccgctcaccttcaccagttccgtatccacgatggaaccccacgaagaagtgaactgtgatgaccgttcccatccatctcctcaagctcagcctaccagttttaagccggtaattattagtttgtatggcctccctgggtctggaaagtctttcctactggaagaactcaaaacggtactcgacaatgacaaatttgcgttctatgatggcagcaatgttatcgcagcggtgactcctgggggtcttgaagcattccagattttgaccaaagagggtaaaaatgatgcccgcgagcgtgctatagccagagtcaagcaggaatgttccaacaccgggaaaagtgctatagtggctgggcatttcatgttctgggccgaggaagatgagcatggccagtcagtttgtacaccgagcgatctgactacgtatactcatatcctatacctaaactccccagctgagctcatcgcggagtatcgttcgaatgatgttaaacggtgccgccagactgtgtcaacctctcatctggccaggtggcaggaaatcgagcaaagccacctctgtcaactttgcagatgccacgatatcctgttcacgctagtgtcgccactagtatccgccaacaagctcggttccattgttgaggattttcggatgcatacggaggactacaacatgtatctcgccaaccaaagaatggaagatatactcgcttcctcctccacggcggaaactgtcatcatgatggatgcagacaagacgttggcgtcggaagatagcggagttcttttctgggagcaggtccgcagtgcttcagctaagcgcaaccccttaaaagctttgttcagtagtccactaggatattcgtacactgcatttcgccaggcaacactgctgtatgaagaggctcttgatgatgtggagtttgaggcctgttgccagactgtttcatcaatgatacacatgcacattgatattattgatctcttctacttgattcgcgatgcgagtcatgtacgtgtggtcgtggttacctgtgggatccgatctgcttgggaaaaggtgctgaagggaaggggtctcacggtaatgggtgatattcgtagtgaccgcacgagtgggtggtatgatgaatggccgacgcacttgactgaatgctggagatagacaagttgcttccagtgtgtccatgctggtgctgcatagcggtggtaggatagggaatgatgagtagctgagtgataggccatgcagtgggtgatgtcaagaatgggatatggcccctctaggtcctaaacaagaaccttggtttttgttatggtctagtggtaaattacgctgcacgaatttcgtcaggtgacaattgtggagtgctagaggcctcattcgatcaggataccgggtgttgctctcgcacagtgacaataatgactttaatattgagctagagcggttagacacatgccagttggtctggaaggctgtattgagtacccacctgatattgactcaactcaagcgaagcgaacttcactctactcttggcgattcgtgataggtaggaattgccgtgtaaagttaaacttccactgcaattttataattaaacagtgtcaccgtccgtctctgcagcaaagtatgttgtggatagccgggaagttgatcgagagaatatttagccgagtttctcaacaataaaagcaagagatatgtaagagcatcccaatgaggtcttgggacaattgagtctcaaagacgcattaggaaccgtccatgaaatcttcatttctcttcatttccccgaccaaacaagcgtttcggtcttgacaaaatccccaaagaaatgtccggaacgatgtcattcgcatcagtgatagcgtgggtgcctgccaatctcatggaagaaatattcgggagtgttcaggtacgttcgacactgggacatataagctgcgcaagaatctgtcacagaggtagctcattgatgactctgtatataactcgttcccatcgtggatagccacctagttaatggggactagttggaaagggtcaaaggtgtctttgggacttgaaactcactgggagatattccacacagagcctccttctccagcacctggcggactcatgtccccttcggatggtactgagctgcgccctacgcaacaggctagatgcgtcgttgtgtactgaggttgaagtaccgagactacgcctcaaatgtgccaaggcatgaacaagcctgctttgtacaagctccatgctcgggaatgttgaatagtcatcagccgagagtgtatgtggaagacacagagttgttggagcgaaaagcgagtggggctctgcttttgtggtctcggcccgcgccccactcatatccatggttccccaggttacggatgacgcaggacgtgaataataatgcctttttgaatgttcgatgtcgatgttatattaatgagacctgggtatatataaagggggttacagaggaccattttatgaatagccagggatatcgctgtcaacaaagtggctggattggttcctgaaacaaagtgaggaatgttgctaccagcttccagtgaaccccgcattcaggagattgggatcatcaactcctcagatcgtcaaagtgggatccatgtaatgtacggacatttgcctcccaccaacgttctacatcaccatgctcggcatgctccctgtcctcctagcgggacttgtaggaggtgcaaactcccagccaaagacagacacaacctatcacaaggatgctggtgtcctcgaatttgtcaaccctctcatcggaacctacggaacaacaccgaatggcaatggcggcatgatcccctccatcagcccgcctttcggaatgacccgctggacaccgcagactcgcgagaacttcatctcgcaagtaccctacggcgatagcgaccgcctcattcatggattccaagccacacatcagccggctatctggatgggtgaggcgggtcaggttgtgttgacaccggggatcggtgaagtgcagccgttgtttcagaacaggggattgcagttccgaaaaaaggatgagaggagtacgccgtacgtctatgaggtacttgttgatgctgctcagctcttgggtcatggttggaatgcgacggctgaggctgtaggtgatgggcctgttcccggtggtgcgggttccgtgccggatgaggtcaaggagggtgccaatgggcggacgcgaaaaagacaaattgagtatgtcctgcctagtagagatggtaatcagtataggcagtcgattcaggtatttccactttttttgggatcgccatgaatgctttctgacgattccagattgccatgtccgcagattcccatgttggtcatcttcgatttgacttccaacacagtcctaccaatcaagatgaaaaatgccagccgtgggtatatattcaagcttcgcgtcggaactggacaggcgaaatccatattgatgcgaacagtcgggaggtctacggctataacactgagcgtcaggattacctcctcggaccagacaaagcagcgtcattcaaaggatattttgtagctcgcttttctgagccatttattgaatttggcgtggcagatggagggctacttataaaggatgaggctcagcgacacgggaatttcacgggtgcatatgtgaaatttgctaactcgacatcgcgtgtcgaagtgcgcaccggagtttcgtatataagcattgcacaagcaaggaggaatctcgtgatacagactccagatgagcacaccttcgaggataccgttgaaaaagtcaaatcagcctggcttgagaagttgggtagggtatccatcaagggcatcaacaagaccgatgcggaccacgaccctcgcactatctggtataccggcctgttccatgctctccaatatccaagcgacttctcagagccaacatcgaagcacgaagatgcttcccgcgttttttactcgggatataccgatagtgtccacatcgagaacgactcatactatcagtcctggtcaatctgggatacatacagagccgaacactctctcttaactatatttgcgccggagcgcgtcaatagcatgatgcgatccttgttacgcatcttcgattggtccggttggctgccgatgtgggccaacttggtcgagacgaatatcatgatcgcaacgaatgcagatgtcgtgcttgccaacgctctggagcgagggtttaggggcttcaatattgccaaagcttgggaagcggtcaaaaaggatgcatatactccgcctgacaacgatactgatactctgtactatgaccgtgagccggccacatcatatgaggcccgcgctggactcacatcatacatgaaacagggctgggtgtctaatgatggctggtctgaagccggtagccgcacattagactacgcatttaatgattacgcctgttccattgttgcttcctatgcgggagaggacaacgccaccgtgcaagccctcaagaaacgaagtggaaattatgcctatctttggaataaagagactcaatttatgcaagcgcgcaacgcaaacgagacttgggctaatagcacttttggatggaccgaaggcgatgactgggtctacacgtttgatgtgatgcatgacgtgaaaggactggctgagatttttggtggccgtcaagccttccgcgataagttggatgcgcatttccagggtggtcacaatgaccacacgaacgaaccaagccaccacgtaccatatttgtattcagctcttggttatcccaaccaagcagctgagatagtcaggagcattgcttgggagaactacaacgcgaccagcgggggcttgggcggaaatgaagacttgggacagatgagtgcttggtatgtcttctccgcattggggttttatcccgtcaaccccgctagtgatgagtatatcgtcggtacaccattatttgagcaagtgtccattcgtcttcctagtggagcgagcactggcggagaagttgccaatgggaaagagaggaggcttgaaattagtgccccggaggcgtccacgaagccgtatattgttagtctgaaaattgatgggaagagtatcaataccccgatcctgaagcacagtcagattgtgaaggcggcaagaatcgactttgagatgagtgctacacccacttcatggggaagtcgccccatatgggaaacttgataccaggagaacatctaaagtccccggaaaatgaggacaacactagctgtgtccatcatgtgtttagacgtttccaccaattgaaagtcgattatattttcgtagatcttgtccgggactctgttgtggtgcctttttccaaggtcgactttttaatcgacttgatcttcatcgcctcaaattcccctgctccatcttcgatatacccatgtcgttttgtgttttactcattggagctgacaatgagttccaccgcccctcattgattttcttatcacctcattctcgaggtctgttgcaaagtattgcgccatagtacatgccacctcgcaatgaacacacaatttcttggccgcggatagagttcaactcgactctctaactggtcgcaaattaatccttggctttgtttatgacctggtgatggtatatccccatgcctgctggagtttatcatgcacggcttgaacaaggattagaccgcgtatcaaggcaatacttgacgaagctagaatctaacatgaacgccacaagagctaaaattccattggcatattccgtcttatcacatcattatagtagtttctgatgacgcctgccgcacccctgaccgcgccccagttattgtaggggtccgagttgtacagtagtatatgtacatgcgaagtcgcgccatgtgtccacgtaagatcaaagaattctctccagccttcccttctgccttccgaaatgggtcttccatctcccgtacgggaatataccgagtcggtccctcaatatgagaccagcgacagtgatagcctacagtataccaccgaggtcggtgggaacacctccaaggccacataccaggaggcctcgggagcgcccgttgaggttaattccccgctggggtattcggtcggttgggttacagtggttttcctgaatttgagtaagatgatcggaacgggagtcttctcaacgcgtgcgtacaacccaactttctctggattatttgatatactcacatagaatagcgtcgaccgtcctcaaaggcgccggctcggttggtctcacgttgttttattgggttattgggtatttgatggcctctagctcgctatcggtctacatggaattcgcatcgtctttccccagtcggtccggctcggaggttgtctacttggaacaagcgtatccccgacccaagtactttttccctactgtgtttgcgatgcagacggtgcttttctcgtttagcagcagcaatgccgttggtatgattacatcgcgggtgaatggtggagtgacgtgtactgactttgtctagtactggcccagtatctcttcaaacttgcgaattcggacttcaccccatggaaattgaagggagtcgctgtggcttgctatactgttgcagtactgggtgagtggtactccttttatctgtatcacatgtgctgatgaagtcgccatagttctggcatttcacaccagatggtctttgcgactggcaaatgcaatcgggctagtcaaactgctgacattggtattgtaagtgttgatccacaatatactcaactcaaccggtaaagctaactggcacttagcattgcgataactggcttggtggttctcggaggtcatacctcagtgaaagatccaaaagcaaattttaggtctgcctttgagggcagtaatgccgcgacagcctacggagcaaccaatgcattgaccaaggtctggttctcttttgcaggctatgagaatgcgttcaatgtcgtcaatgaagtcaaggtatgtacttcacatgatcatgaccacttgtttgctaacaagcactagaatcctaccaaaaccttgaagtggagtgcgccgctctcgctgggggtgacggcaattctgtacgtgctggccaacattgcctactttagtgctgcaagcaaggaagaaattctagaatcgaaggtcgtcgcggctggtgtctttttcgagaaggtattcggaactggtggtgcggcatccgctttgaatttccttatctgtgtgagcgcttttggaaacctgcttgccgtgcttcttggacagtctcgcatgctgagggagtgtggaaggtcagtgatgaaacagaatttacttttggaagggaacctaatgagttgtttggatatagacaaggtgttttgccattcacttctttttggacgtcgacgagaccgtttggaacaccgctcggtccatactttgtgaaatgggcattcaccgtgttgatgatcctagcaccgcctgctggtgatgccttcaatttcggtacgcccttttctattatctgaccttctagttgatcatttctccagaaattgaaagacagtttgctaattttggggaatagtggtggatctcggagtctacgccacgacaatctttggtctgctactcacaataggcctggtgatcattcgagctcgtcgtgcacgcctcaacctgccaaaacctgaatacaacgcctggcacgtttcagtggcatttgcaattctttcgaatctgtacatggtcgtaatgccatggtacccgcccagtactggggcgaatggaggcgatgtgagcttctggtatgcaacatattgtgcggttgctcttggaatgtaagttgttcctattccaggttgtccctgtcggtatagatcactgacgtcaaagaattaaaacagtgtcggtctgtgtggagtctactattatgtctggatcaagcttctgcctcgaatccagggattcaagtgggagcaaacggttctcaaactggataatggtgccctggcgcatcggcttgtcagggtgcccaagaaggatacctgagatatgtcattaggtaacctaataagagatgcaactcttggtatattacccaactactccgtacatttatatcattaccctttcgcccttacgataccattttagcgtctaagacgtgatctcatattggacgccaagcctgtgcgggactccacttcccccggggccgacccgttccttttccagctgtaatcatatctacacctcgcaggatgcacgacggaaggaattgaattaacttctcaaggagctgagattgatacaatctgcagattctatctcaccacggggttatgggctgaagatggcaagcgaagtggtaccatgcgatgaaccgatgggctgtcggctagggagcctatttctccgtgagcttttgaggctgttcatcattagacaaatggatggcactacaacatacgatcaagactctgttgctaaggttgttaagggcgtagcaaactgcaccttccaaaacttagttggttcgttctcggggtcaaatgcctgaatgctttgtttgagcgtttatctttgcctggtttcagaccgctttcaggctgtatcgtgtactacgtattggaaaccgggcgggaataactaactatgctctagagtgcacgataggctgtttgtaactgtaattcgggtatctttattttctgcccgccagaaataaggcattcatgcgtcaaattcaggcaagcagctttgagcgctataacgtaatccactaccgagctggccacaccaccgagctggccaccccacccaaaacgcgtccatgaattagcacttaatgaattcaaccacccaccatgccactaattcgctctcaaagctctcgaaattcaatagagcaagaaggcaggatcttattagctatccaggctattaagaaccgagaaattagttctattcgggaagcagcacgcatcttcgcagtaccgagatcgacccttaccacgcgcctccggggcgtacaaaaccgcgcgatttctcggcctaactcacataaattgatagaaatcgaagaggaatcgcttataaaatggataatatctatggattctcgcggatcagcccctcggccctctactattcgagaaatggcgaatcttttactcaaattgtacggaataaccccggttctttcagtcggcgagaattaggttataaagtttgtaaaaaggtatcccaaactcttaagccgattctcaagacactataactataaacacgtaaagtacgaagacccgaaaactattagggagtggttttatcttatttaaaaaactatcctttaatatggtattgatcccgacgatatttataactttaataagactggttttgtaataggattaactgtaaccgcgagggttattataagggctgaatattacagttaccgatcgcttttataacctagaaatcgcgagtaggtgactgtaattaagtatataaatacttcaggatagatattccctctatatatgatttttaaaggtaaagtctttattaaatcttggtttaatagcctccctaacgattagcaatttaaagttagtctaaacagatggacctctaataaaattagacttcgatagcttaaaaagctctttattccgttaacttctttatagacaaaggggagatatcgacttctaatacttaacggccacagaagtcatttaaccctaaagtttaacaaaatttgtgaaaaaaataatattattctaatctatatacctccgcacttatcttaccttttacagccacttgatatcggttattttgcagtattaaaacgcttatatagtcagatagttaaaacgaaaatacagagtaggataaattatatcgataaacttgatttcctcgaagcttacccatctgcctaaatcgaggcctttaaagaggatactattaaaaatagcttcggagcagctggtttagtaccttttaaacctgatcgagtgattttaaagcttaatattcgccttcgaactccgaccccccttttgagctaagagaacgagtaggagctaaaaacaccttcgaactataaacaattgctaaagcaagcttcctcaattaaagcattgctttgtacaaggtctcgaagccctccgagcccgcttaattctgcgataaaccaggttttaaaagcctattaagttacaatacaatcggctgcttttctcaagaaagaagtaagcaatttacgggctataaacgagaagcagaagcaaaagcgcactcgatctagaaagcagataccttctaccgagggcctctcggttttagaagcatcgacattaattgtacagccagaggaagcaattaaactacctccccctcctcagccaagaaggccttcgccacctttattaccctgaacgagagtgttaaataggtgcagagcatgtggaaatctcgggcataaaagaaatgcatgtccagatagacctagatagatagttttattaatttatggcgttttggttgagatatattgatttaaaattcagaggttggttttggtggccagctcggtggtgtggccagctcggtagtggattacgttatttagactttcccatcaccatttccccatctgatacatcccaacgaggccaatttcatcgtgagttttatttctatctttacacgcttctaatagctaacatctacacttggactaggcactctctgcgtggaccctacaagcaaagtcaagactctcatctatttaccctcatctaccaccaagatgccatccagtgacgcacttcgtatatacccccccttctgcattccaacacaaattgttatctatggctgactttaactggaacagaaccgcctcttacgcccgctgagcgggcaattgtcaaatcctacggcggctggacacgcttcatgcaaagctacgggctcaagccttgggaagatgatgatgccgaggagggaaagaaaatcctggaggcccttgctctacatgaggaagcttccgaatgagacgggtctagccggtgtttggctacaacagaaggatgcatcaccttgattttgccttggactgatggatgtcgaccatacgttctccgcaccctccttcggactttcgattagattcaatcaagtattttcttccagtgcttgcattgctggtacactgtgctttttgggatttatgaatggtagagcaatttttcgaatgcaaaaggctgtcaggtattacattagatgggcgcacgcgatccatttgacaatttcaatttgctctgcgaaaacatagaagaatgtcacataaatcaacaacgcaccaatccaactccaacaaaaccgaaaccgagaccgaaaccgaaacctaacctagtttgaccaaaaaccaattcataacccaacaccaccttgccgatagaaagaaggtccgtaacctactcggtttctcccgctggattaccggcaaaccacatcgcaaatgcttcaaaaacctctgccgtagttttcctctcagacaggtgataaagatcagaagagcgtagaataaggctttcaccatcaaaataggactccagcatacgtgcatgctcgcccatgaacgaggcgaccaaaacctgtagagtacctagttagtaatctatgaaagtaagaaagtgaaaggagggggtatagacttaccggtgccactttatggtggagtaaccgcatcatcctgaactggcagatcattaggcggaggataatcaatagctcgccacggcagagcttgctatcatccaccagtaagccgctgtgtgcgattactttaatatgtggggctgctgccccggggatgtccatgatccacgaaacgccaaactagggcttgtcacacttgtacaacgacttgaaagcatggtacttgcaaacactagggagtagaatagcgttagaaacaatggggtgatatgataatatatctcagaatagtaatggatgacacttacggctttgaacgccatacgcggtcattacactcccatcgtacctctagaccataatgtcgccacactctttcgaagtgatatgatctagagattgtgtcttcaaaaaggccttccacatcgaccgcttcatcgatcacttcatcggtaggttgtgggatgttagatatcgccgcgaagtaacggggcttgaggtccgagtcttccctaagactcatatgctcgcgcttgatgttcaacttggcgagttgcgacgcgtcgaattcatgaacctcaagagcttcgatgtcagcatggagcttgactagagccagacggtgggcgagatggacttttgattcccgagaagttggctttgaagacatctttggtagtgttgtggtaatgatggcttgtagagttgtagaaatttggaagagtgtaactgggggggacacgctaagaggaagctgatcggactaaccctaaagagatgttactcccagtatggaccgtgggatactacagaggggggtcatatgcgtgtgttggggccgattttgttagcaattgccttgcgagctgaacaggagggcaaggaagaggagagcgaaaattaggagagcgaagacgaggagagccgagcctcatatgatgtactgttttgtggactgcgttgatttcaatcatgtctttcgtgtttttgatcttttcttgatatgtctcgatttgtttttgttcagaatggtctattatgttttggaattcatgcgcgtctttgtccataaagatatcaatttgtgtattcaagaattgtaccatcgctatcgtatagtgtatgatccaagtcaggagttaattaacagtcacgagggcttatccatgaagtattacttaatgcccaggtggcaatcctgcgtacggtataattccgaatgaagcatatcaaaccatatctatgagatatttaagtcgcccttattctaggatttcaattcgaatatgactacaaataagtgttcagcaaatattctagggctcccttattcctctttagtgcgactctacatagtggcactaccttatattgcccatggcttcgaacgcagtgatagtgtgtgcgatagagagagagatttcttttggattcttcctgtcggcatccagcacgaaatgtcatatactgtgaatttcaaagcaaatatgaagcaaccttcttatcatccgtccgtaacattatcattacactgtcgtgccatgtattcaaatatcccagatgtccttgtgtatctgtaaatcctgaatcccgctaataagctatgtaaattgcaatcagatagtatccttaatgggatccttttcagcatcttcaatctttttcaaaaattcctctgccgccttagcatcgccagggaatatattctcggcaatcattctgcgaggtgagctaccaagccattggaacagtgagaaatcctggaatcgatctgcccggaaaatttccaaaacctccagcggttcatcgtcactcaggttctcaacgaagtgtcccatattccgaggcacgatgccgacatcaccggccatgtagttgaacgttctggcgtttccttctgcggcaaatatcgtaactcgcgcacgacctttcttgtaatatgtccattcgtcggcgttggggtgccagtgcatctcgcgtagtgcgcccggtgcaatctctagatgggcggctgctactgttttggaaaccgggaagttcgtggagtcggtaatacggacacgaccgccgctggttttaatgggttcttgggcgagcatatgatgtgtgaagttaatctttgacttcttgaaggtgcgtggtttctcctcgtcaatgcttcccgggtttgagccttggaatatgtacttctcggatttcgggatgttgtcaaattgctccggtgacatccggaagttctctcctagaactgctttgggagtgtgagctagggaaatgggtcagtatttgtaaactatatattttgagacatggacagattcatacccaaccaatcagtcaagatgaaggtggactcttcggagaagttgccatcgtcaaagatcaacaggaattctgtcccattttcgcccagaccctggagcgaatgcggatgtccagcggggaaataccacagatctccttcctccaagtcgtccataaaagtaccgccttctaagtctagggctgtgactcgtacttttccagcaagcacatacgcccattcagcttccgtgtgccaatgcagttcgcggattaccccttgatccagacgcatgttcacaccggcgagttcacggctagtgggtagctcgtggatagttgtttgtcgcgtccatccgccttcctatacgtacacgtctaggttaatgacgtacgtgacatattagaatgaccatacctcgatgcgaatatgtgagtctgcaaaactccatcgcatattaggcatattgccatggtcggtactcggcggacggacaagatcggggttctggcgctcgcgatcccgattccgcggtcccatgaccgtagtaccatctccattgcggaacggcagtggatgtcggtcatcgccaacagagtcaaccttgtgatcatatgggtcgcgatgtcctggggagaaaggtgggttttttccaataggctgttgaccgaataatgctgcggaatggccggctgggacctgcagtagcttctgcaggctgtgatcaggtgcagggatagcccatacagcctgaagatatgccaggtttaacaagaagcgtgtaatttgcatggtgggctttaaaattaataaattagacagaggaagagaagaaattcccagaagatcaagtgtaaactccggaaatgttgttctccgcatcgacgtcacgacattgcgcatattccgatcgcatatcctgtctccaattgttcaccccaacaaattggccgattctattttagtgcacttggattctccaaataggtagggatgacgtctcattctttacggtgatcaattttgagttcctacgccaagggctccacagaaaccgaaaaaacaacttctctccacttcaatccgacgaccattacaccaatgtctgaaacagacgccctgttgggcaaccacagacgctccaaaccctctctactatctctagcatctaaatgcttaggcagtgaccttgatactgcgcatggcgacctagtccttctattctgttatattatcaccggcctgctcgacagctcagcggtactcatatggggctcctttgtgagcatgcaaaccggcaacactgtatatttcggcctgggccttatcggcgccaaggatgatcgctggatcaagtccggagtttccattgcggcgttctgtctaggctcgctgtgcttcgccaccttccaccgtgttttcccagcgagacggagatgggtgctctgtgcctcgttcctcgctcaaaccgtgtgtgtgtgcatcgccgcgttgatcgttacaattcatccggcatctcgagatgcgcccttgacttggttggtcctcgtcccgattgcgctcatcgcattccaaagtagtggacaagcggtgacgagccgtgttttgaacttcacgggcttgactagtgttgtcctcactagtacttattgcgatttgttctcgcaccctgatttcctctcgggaaaggtggtcggtcatactgaggagaaccgccggattggtgcaatcttgtgcttgttgttgggggtggtcttggggggtctctgggctcatagctctgtgggaatgatgggggccttgtggaccgcagccatcctgaagtcattgattgttgctgcatggttggcctggaagggaaagagcgaggaggataccgaatgagttgcaaggctgatggaagatcgcggttttgcatagattgtggactcatattgatgtatttagaatactaattggttatttcgaaatagaggatactgattatactatctcagttttctgcaaccatgttcaacgactatgaaatttggattttttgtctactgtcttgaaaccccgtcaatagatctagagtattccaatctaggggatggtgtcgcccttgatatctataattaaaaaccaataagatatacatgtatgccttgggatattctccatagtctactccatctcccagcgtccaagtcaaaattcatatattcatttcatggtcattatcatctcgtaatagcctagccaggtacataagaaccaaaacgaatctcaatgtcaatagctccgctggaccgtcatcgcaggcccgacatagtgtcttctgccctgaaacaggtacatcaaaagactgccgatgaacacactaacgaaaataaccacactccaattaaagtctcgagccgaaggcaaagggctcggaggccagaacgaccaaaagagtgcgaaaataacatagagcagcccaatgatatttatcgcaagaccgaaacgaccaagactccaacgtcgaggaggtagcgtttcaggacaagcaatcttccggtaaatcacgcaacttatggataccgcgtatgtgtacatcagtgcagcaacgttgagagagatgatcgcgttgaatgcaacctccgagcctatgttgattaccgacagtaagacactgatcatgcatgagagcgcgatcgctcgcactgggattcgccgatgaaggtcaactcgagagagccagtctgcgaaggggaggccgcgatctcgtgcgaatgcatatgtttgacgtgcagttgatgcattgaataggatgttactgaagatgactggtattaggattattgatgtgaggccgttgacaccggagattgagaggaattggtggaacacgtagaggaaggggaagccggtgctgtcgttgatagcatcgggtactgaggggatagcaagaagaaatccaacgattactatcagtgctagtattccgttgccgaagtatccccatacgattgcgattggtacgtatcgacctgcatccttaacttcttcggacatatgtgcggtggcgtcggagcctataaatgtgtccatgttagccttgtaccgcgaaagaatgatacggtttgtacacactcagagagccgtagatggctgtaatttgaccgatcatcaagctgatccccatactagaccagttgccaccattgtggaacgatgtgaacacggttttggccgagttttgaggagccatggtgaacaaaacaaccacaatgatgacccagcataacagatgtagcacgagaaggatgttctggattcgtggcatccagcttgccgcgtagacattgaaaaagtaaatgacagctatcatggcgaacacaaacaaggttccatgccaattttggggcacgtagctcggatcacggagggttatgagaccttggatgatagttccagttagaaacgagccggatgctgctcctgcctgccaggctagtacggacatccatccttaatcacacccattagcgatcgtcaaagatgaatagacgagcgatctcaccagtggtgtaactcagaaacttctggtaacgaggcgaggaaaactctgatacccaatgatattggcctcccgatgtgggtgccctgttggagaaaggaaatgtgagaaatctcagaaaatgaggcacataataactcacatcgaagccatctcggctagcgaaacaatgataaagccaaacccaacgaatgtccacatgtaagaccagaatacaccagccagtccgccattttcgagaccttgggtgtttgagctaaggatgaggcgattagcagctgataagatggcccaagagactgcggctcacatgagtataaactcccaggtagcttgaagaaccgctgaaaagctcaacgctgcaaggggtcgaaagttgcgcttcaaacatgtcagtgacagtgtcctgattgtgtcacagagaaagaaagaagaccttcaattcctggatcttccccatacgcgtcatatcatcctgatcctgtggactgccctccatctctggtaaatctttcgtgggatgttcttccatcgtgtgaactctgtcaaaagaagagattcgattgtgtgattgtgggctttgcggtggcattttgacaaattggacaagtccgaacccacgttgacatatcaatatttgacttacagaagagccaactccaaggttagatattagtcaacgacacaaactaacatttcaggattggaggtacaaaaatacgagacacttggctttgccaaccgaaggcaatctcggctgttccgctgcaggcatccccagtagtgatacaacgagtcgactttgaagccgaagttctccctccccaccattgttacatacccctcgatggacgatgaaatctaccgataataattcacaccaggccacatggcaaggcctccaggaacagccggaccggaatcggcataacattttgtgaacgttggcactgccctgaagtgccacagcgcgtttcgacgcatatctggtcgggtaggaccatttttcgctcgagtggactagttcatcatccctgtcaatgactgtaccgggttttctgcaatttattgcccgcgtactccgtactctcgccaagaataagatgaatcgaatccaaccccattccccggatgccggcataaatcgttgtctggacggaattcggtaacgaagctatcagaacgccactcgctggtttgttcagctgccagccttaatttaatgctccattccggcttctatctgtatcttcccgcgtcgatgcaggaagggttgaattccgggctaggttgtacgaagaaatgggatttggaagtcgttccgagcttggttggccatgtcagacgctgccactaggcatatatctgggcaataccaaacaaaggcgcctcaaataaatgacatggcgcaaagaccaaaatcgagaactgcgagagtcccactgtggcaagtctttatttttagcgtcctgcgcgcaggctgcgtctttccctgtccgttgcgattgcaattacggcaaacgagagtgagctacacatgtactccgtattgtgttgcaaatatttctagtatgagttactccattatcttactttgttgtattcggcacaatataaatgtaacagtgaaattaaacactccgagtggccatagcccaccagacacatgcttgatcaccaactcgaagttcatagaaccttttgcatttacatattcgactggatactcaaacagtattaggcctgagaataaccttaatcatgtgcctgtgggaatattaagcgcccggatgatctgcaaaatggcatgttaaataaatacattgaccccgttcactgaatgcatccatatctaaaaattacccccgatatatgatcccaccaataggcacaattagtttgaatctgttggaattcggtagcgtctgttgaccaccagggattgtgatatctcccagaaaggaaaccacgtattccccaaatctcgaatcaagctaataatacgcaacttgaaaccaacagtacagtcacagcgcatgtcccggtggatcagccaatgcactaaggtcaaatctcagttttgatacaggctggagtggatggagatctgcgattcgtgattagtatgccctgcatcacagtgtaaatcccctgagtcagccagtcagtttggatcaagctgaatatatccttcatcgagtccctaggaacagatcaggacatgtttctttcttttggccatggcaactctctccccagtgccgcctggcttgacacccccgctgacagcggatacggaaataaaccataatggagtgattacagtcatcgcgtccttttcactatttctggtccttggatctctaggaattcgtgtttattctgcatacagtagaagagtccgtcagttggatgatttgactttcgcagcgactgtggtaagtctttccgtctcaactaatgcggacccttttagaagactgacgaatctagattcttgccttggcacaggtatctgtggtttttgtggagatatatttcggctggggaaagtcaaagtcgctcatcgctgatcaagattggaactcgatcgagaaggtaggtgtctatgaccaggatgctgtatcatttttgacacaatgtccttctaggttggatacagtgcagatatcctctacattgcaatattatcctcatcaaaagcgtcaacggcgcttttttaccggacgattactctacgtagctcgctatggatgagctatgctcttctctcggttactctactctgtgcccctgttactatagttttgctggcagtccgctgtgatcgacatccatggcatgatatcaataaccaatgttccgccttggtaggtcacaatacagttagtactatatctctactaactactagctgtctagttccctcactggcaagccgtcacagctttggatatcatttttgaaattgtgctgttgctatatcccatccgggcaatcgtgcgactgcatacgacgatcaacaacaaagtcgttgtaattctggtgctcagttgtcgagtattgtatgtttaagctctcactctaccagtttctacatactaacaatgggcatacttgcagccttatccctatcagcgccatccacctccattacattcgtcatcaagtcaattcatcagatcccacactcgaaggaaccttcgcgaccgttgttgcagagctccacgcggcacttagcgttcttgtactcacagcgccgttaatgaaaccatttatcgcagcctacgtcgacgagaatggactagcctataccgacgacgcgtctaagtcacgaaccaaccagaagctcacacctaactccaaccgatcgaactcaacatatccttcgtcgcgggtgagtaattctccagcgaaaaatcgcatcatgaagaggattgacatatcggtggatcgcgaagatgtggagcttttggagagacgatgacgccctcaacgggaggcccgagttactatacacttaatgcattcacctgataggacacagtcacatcgcattatgctcaatatctgccggctaagttggtctgaatgaatatgggatcaggctgtaatggtttagcgcgtagagtgggatcagcacccattccaatacggggtaacagccagatatatccactttaggtgcgatgagtctaactcggatataatcggacaataccccatgtggaacttgataagggcaacgttccagtatcctggtgatagcagaagcgaatcatggtctcgttaacacgagattataccactaaatcgatcagcaagggtagaatctccatatcgggatatgaggtggcggaatcaagctaaaccaagcgtttgcgtggatcaattgcgctagattcggcgttttctagtgcacgccattgctctggccactcagtccagttatagatctttatctcaccccgcgaataagttcattccaggttatgacatcatcgatctacagtctccgaacttatcattctgttctctcacatccaggcactggacttttatcttttctcctgatcgctgacagtgatcgcgatcgctaaaagctctgaacagcgaccccagccggtgcgatggcagattatcgccattatcctctctcaaatgacgtcgacaacaggagttatgctgcagagaaagaagaggagaaccgatcgggggatgtgatctctcacctcgcagacccatttggggatgaacatgatgccgaaattaagtatcggacgttacaatggtggcaatgcggcatgatcatgatcgcggagaccgtctccctcggtattctgtctcttccgtcggctgtcgcagtcctaggtctggtgccgtacgtttctactacctctgatgcacagaataggaatccgctgactgctttccagtgcgatcattcttattgtcggactcggtatagtcgcaacgtacactggatatgtcatcggccaattcaaactcagatacccgcaagtacatagtatgggagatgctggcgaggtgatgttccatcctcttggtctagctcgctttggtagggagttcttgggaacggcgcaactgctttttctcatatttgtcatgggcagtcatatcttgactttcagtgttatgttggatacagtcacagaccatgggacttgctcgattgtatttgggatcgttggcttagttgtctccttcgtttttgccttgcctcgaactcttcgcaaggtttcgtggttctcgtttgcttgtatgtatatccaaatcttttcagaaccagcccctttctaactctcacagccttcgcaagcatcattgccgcactcctgattactatgatcgctattgctatccagcgccccggtgatggcaaagtagatgcgactacaacagtcagcctgtcaaaggcattcttagcagtgacgaatattgtatttgcttatggtgagtactaatcagctaccctgaccttgaaactaatctttatctagctgggcacgtggctttcttcggctttatttcagagatggagactccaacggactatcctaagaccctctacatgctccaaataaccgatacgagtatgtatgtgatagctgctgttgttatatatatctacggtgggaaggatgtgcagtcacccgccctgagctcgacaaagccaataacagcaaagattgcatatggaattgccattcctacggtgcgagcctccagcccatgtttgatttatgcagcatcctaatgtgatattatagattgttatagccggtgttatcaacgggcacgtcgcatcaaaatacgtttacgtccgtcttttccgaaacacaaatcacatgaagcagcgcacattcctctcgatcgggtcctgggttgcgatcagtcttgtgttatgggtgatagcctggattatttcagaggcaattcctgttttcaatactttgctgagtctgatcgtaagtagtcggggattgcatgtgacacctactgacatggattcatttattagacttccctttttgctagctggtttacctgtgagtgatattcggtacacaaactgttgataatgctaacctagattaaagatggtctgagtggtatattctggctgttcctgaatcgaggccagtatggggcgtcctggaaaaaaatggttctgactgttgtcaacctggtggttatcgggattggtgcttgcttggtatgtcaaatttcacaatgctcagacatttttcagactactaatattcatgaagtgcggcatgggcctttgggtttccggtaaggcaatgcacgatgattccagtggtgccagcttttcatgtgctgccagaagtggatgaaccctgatgtcctgatgttcatgaatgtctgcaattttttacaggtataatttggctttctttttagtgaatttgaatcattaatatcaagatcagtgttattctcggcctgcgtgttacttacatttaaatcatgtgttgttcgtgtattcgaatgatatatatccacctccaaacatccattttccgaacaaaggactgacgcaatattgaaccgcctgaatatgtactgagcttgtcgaacttccattcgaaaatacgcaacgatgtcgttacctacctacatcatgcatgactcagcctagcgtcgatggatggatgggtgccatgacgttttgcaagatcaaaaatcatctgttgttttagaatgtaaaaaaaagacacagatgagttcgaatgatcgatttctacgaaactggtgtgcttgcatatatgaacgggctcatagtgagcttctacccagtgctcaccctcgttgctaatatcagcaacgaaccactgccctcaattatcatcctccgttgaatacgcgagtcagattatttgtgatgcccagcaaggaaacccaaaccttactgtcctcgcacagcaatcaatcagagcgtgaatcaactagcttgcagaccgtgttcgacgatggcgacacatacgacgtggccgatgggttggaaagcaatgggggctcttcgaaaatcaagcccgagagatctccaaatgagaaagacaacctgatagtggactggaacggcacaaatgatccagcatgttgtccgattcccctccgagtatacaaggttcctctaatacaattttaggagaagcccaagaacttccccacgtggaggaagtgggtgatcactatggtgctaggaatgatgacactctgcgttacttttggctcttcgatcttcacaacagcaacgagacagacagcgacaaagttcggcgtctccatggaagtcacgttgttggctgtcagtttgttcgttctgggcttcgcctttggccctatcatctttggccccctttctgaactgtacggccggaagctaccgttgtttctgggcatgttcggcttcgcaatcttccagattcccgtagccgtagccgagaacttgcacactatcttcatatgtcgctttctgggcggaacctttgccagtgcacctcttgccattgtgagtttatttcattatttccaagctgcgcatttactttcgctcactgacttcctcctccttaggtaaatggcattttggccgatatgttcgagcccgtggagcgagggattgcaatggccgtcttcgctgcggcagccttcatcggcccggtagcagggccaatcgtcggtggattcataacaatttcatacctgggctggcgctggacagagtacattacagctatctgggcatttgctatctccagcatcgggatcctggttgtccccgagacgttcgagcaaactttactcacacaacgcgctaagcgacttcgcaccaaatccaagaactgggctcttcatgcgaaggcagaagaaaaggtagtcagttatcaagatattgcagtacaatatctcctgcgcccgttccagatgcttgtgcaggaacccattcttctgcttattaccttgtacatgggtttcatatatggctttctgtacacttgttttgtggcctatccggtctccttccaagaacagcgtgggtggaatgatggcattggagcgttgccgttcgttgctttcatttgtggtgtcttttgcggttgtttgattatcattgcattttcattgacgcggtatcgaacgttcatactccgcaatggccgagttcagccagaggagcggttgattcctatgattattggaggtattttgttgcccgtggggatgttttggtttggctggacgtcagatcctcacataatttgggttccacaagttatatctggggcattcttggggtcgggggtattattgatcttcctgcaggtattattatccctattggaagatgaataacattttacaaatacttacgatactcgccaggggctgacttatatcgtcgatgtgtatccgatgtatacaaactctgcaatggcagcaaactccttctttcggtcatggctgggggctggatttccgatgttcgcaccaccattggtatgtcatgtccctctattagcggcgcaattcggctaaccgcaatacaacatgtagtttcataacttgggcgtcgactgggcgatgactttgctaggttgtctgaccgtcgcgttgttccctgtgcccattgcgtttttcatatatgggccgaaaatacgctcatggagtaggtttaccatgaaggaagaatgaaggtagagctgtgagatattcagggccgatcgagcggagtttcatcggacataggtcttatatcgtgatatctgtgactggtcaatataggatgttgatatagactgacataatattatcaagtgaacatcgcaacatcttagtattcgcagctctagaccggaggagttatcaggccctttgtcgttattatgcaatttgtatgaccaaagttaacgagccgttactccgaacatccgtctcggctagaagttgcaacaaaaacgacaaatatgtatgacaagcagttcgtgttatcgcggcccgaggcataaatagtcgctaaaatctccatcggccatgtccgatgtggagaaaactgtcgcatacgaaagagcgaccttgatgctacacggtcgagccaatccggtagtggaaaccttaccccagcttttcaccagcgccgcagagtttcagctaagctcaatggcgcaacccatgcagcttgaatcgtccatcaccacatctcgtgagggggaacctggggaaaccaagacttttagctaatattatcctcccgcttcatggctctcgagcatttctactccactcttctcgaagacttggtcttcggttccacactctcgccaatgggagctgcgcttcatcgatccggtctgcgccgccccacgcactgctcggttccaccaatatcacgatcgtccggtgggcggcgttcgccgtccagtactcagatgagtgtatatatgatctttatatccaacctcgtatcgatttggcggggaaatcggtgtggcttgacctccaaaccctagatcttcaattcgtctctatccgataccaatattgcaccatggcgccatattttggcctccgtggcccttcgctgaatagggctatcatgtggttggtcgtgtgtccggccttcgtgacttatggatacaaccaaggtgtgatgggaggtctgttgaccctggaatccttcgccgagacctttccgcagatgaacactctcactgcaaccgccgcacaagagaagtataactcgactattcaaggtaagcttcatcactatacctggggcacagatcggtcccaggcccttggcacaccacttggcctgtttctcatgctgtatacttgcaggcacggtagtcgcactatataccgttggtggaatttttggttcactatcatgcattcaattcggtgacaggctcggccgccggaaggtcatcctgttcacctccttcatttcgataattggcgctgtcttgatggcaacgtccttttcacttgcacaatttatcgttgcacgactcgtcctcggatatggaactggcggttacgtggctacagtacccgtctggcagtccgagatctcaaagcccagcaagcgtggtgctcacgtagtaactgacggcatcttcatcggtgccggtatcgccttctctctctgggtcgacttcggcttttacttcgttaagaccaactcggtttcctggcgattccccttggtcttccaggtcctgctatcactaatggtcatgagctttgtgatgctcttccccgaatcgccccgatggctgatcaaaagaggtcgcagcgaggaggcgcgcgagattttggcggcgctggacgacgtcgaccctcattcggaacagatcactctcgatattcgcgatattgagacctccctagctatttccggaaccggttcgtggaaggatatgctgaagatgggcgagcagcgactcttccatcgcaccgttctcgcctgtatgggtcaaatgtttcagcagatgtgcggaatcaatctaatcactttctacgccacgaccattttcgaacaatatctcaagctctctcccatccagtcgcgtgtcctggccgcatccatgtgcctaacacagccgctgggcggcctgctggcctattttaccatcgaccgtctcggtcgccgcgtgctcatgctgtggagtgctgtcgggatgtcaatctctatggccatcctggctggcaccacttccgtccaagataacaccggcagcttggtctgcgccgtcgtgttccttttcgtcttcgaattcatcttcacagtcggatactccggcttgaccttcctgtacgccacagaggtcgctcccctccagtgtcgagcatctatcagcgccgtctccgcggccgccgtctggacttttaacttcctcctcgctgaggtcacgcccgtcggcttcgctaccatcgactaccagtactatattatcttcgctgtgctgaacgccgccatcgtgccgactgtgtatttcttcttcccggagactagcggccgcagcctcgaggaaatcgatgagatcttcttgcagtcgcgcagtatattcgatccgcctcgcattgctcgctcgcttccccgaatgcacgttgccgatcctcatgggttggatctcgacgccaaggatgttggaagcggtgatgaggccacgggcgagaagcccaaagtgtaaactattcacgaatatatgaaatgagggtgctgcttgtttagcgggatatgtaaatagaattcccgaccgtgtcccttgcgaccggtcattatagacttatcaaatgatgcattattttggttgattattttttatctttcatctatagtgaaacaaccggtagattgacgtatcgatccgatgatgcgaccggtgtttcgctcatacttggcgccgtttcaggctatgctgcagagtttcgtcattagacacaagaatccttatttccgtgacttatttggagagacgccttgtcgatcacatgcaagatatcaattgcgccaatatgggatatgaataacgtgaagaaaaggaagaaaaattaccaggttagagggcgtttgaaagtggccaaagtgacatccgaaggaatctcaccagatcccgcattagtgattcaaacaagcccggtttcatgatctccgtggtctccgtgttatatttggcgggtcttgtctggcggtacaggtatataacagcgtttgaaagggagtcattcgtgcttggaaacaatacggtcgcgatcgcacctcgaattcgccgagtataacacaaactcacgaacatcgaccaaatgtgttttattgcatggctcgtcgccctctctggagtagccgaagcgggcgaagtcctgtggagcgggttattcaacgcgtcggcgacggttgccgactttgacgaatgtgagtgagtttcgcgagttgctgtcgattggtactgacaagcaaagggtcatggtctaaccaagtcggcgcttggcagtggtatattcacgggacagcatccacggaccagtatctgggtctctcgcctgatcacaagaacccggccgataccagtgatgaacagggcatccggatcacaatcgtaggtcattttatctagtctgaaggacgagaagctaatagcagtcaggatggcacgtcgttctggaatggacaaactatggaacgatccgagatcattcctcagacaaaggcggatcttgggagcgggcatctgttctaccatttctcgctgaagacagaggacacgaatgcaccaaatgcgagcttcgagcatcagatcgcgttcttcgaggtatcactcccagttccacggtatagaagaaaccaacagctgacgattttccgaagagtcatttcactgagctcaaatacggcaccctgagcggcgcttcgggcgaagacaacgcgcttcgttggtacgtcggtggggtgtcgcactgggaaaccgacctgaaagcagggcagtggtacaacttcgcgtacgatatcgattttgacgcgaagactgtggggctgtgggcgtcagatgggtccgatgacctcacgcaggttgtgtcggctgtcagcgcgtcgacttcgacaaattccgcggattggcatgtcggcgaattgaggctcgacaatgggggcttggatgcagctgccgaggattggttttggtctggcatctttgtcgaggaggctccgatcacgtctagtattgcaggtcctgcgtaagacgtgacttcaactctatttggaatgcgttgtttgatcgtattgcaatcaagacaaactacttgcaaacatgccaaacctgtcaaacagccttggatttatgaggtcatacgtcgaacaggacaccgcttttggaataactctggaattgatctcatgaactatgtcgtcgtttgaattcgtttaaaaagtacaaaaaaggtttttaccgcacagtgtatccaccgtcaatgcgcaaatcgttgcccgtcatgtagctgctggcatcgctagccaggtaagcataagccgccttcagctccttcgcatcaccattgcgacccatggggatcatagagagccaaaggttctgaatatcctggggaacgaaatcagacaacccggtgtcgatgtaaccaggcgagatgctgttgacgcgggcaaagtcgcgccattcattggccagcgaccgggcaaggtgaatctcggcggccttggcaacgttgtatgaggtctgttcctgggggtagttgacaatgtggcccgacatggaggcagtaaggaccaagctgccagttccgcgctccttgaagtgtgcgcccacagccttggcgcagtggaaggcgccgttcaaatcggtgttgatgaccttgttccagtcctccactgatccgtctaggatgccgctgtcggctgtacgcccggcattcgcaatgaaggagtcgatcttgccgaaatctttgatcacctctttcacaaggccttccacgctctcccagttgcccacgtcgcactggtacagcttgaccttgacgccgtaatctgctgcgagttcctgggcgttcttttcgccgccctcccggcgggaggagtatgtgatagctaggtcggcacccagctcggcgcagccacgggcggcttcaatgcccatgcctcgagccccggaggctcccgttacaacgacgaccttgcccttgaggctaaggaggtcaaggatgtggttggctttggggacagggataggcatattggtaggtatagggtttcggtttggaggttgagagagatatgctctggtagagggtttaggtttttgagggtataaatgagaataggttttgagttgttatagcttattctcgacggatatcaagctgggcttatatatgtctacatccctctaatgacttcatggctctcgctctgacatgagagagccctacctgggcagccgagcaggtacctcctgtgcccggcttcatcaggttatgtggcttgctttttccaacttggcatatccaataatatcatcgaagggcttcgattatgacaatgttggtggagaaatttggcggggcagtgacatcatgagccgatctggtaagccgggagcagcccgaagtatcaacttgtttgatatcattgagtttttgagattggcaatgacaccggagttttacgaaccaattccaaataattctagaggggtctttcgagattatcgctcgtcagagcatatcgaagctatgagatgccaaggcggagtagcattgtcaacttagaagattccgaagtacaacggtactctggcaatccacgggagtaatagagtaatacgatagtataaaagtataaaagaaaggctgtcgacaaagccgtcaaaggccatcaagtcatgacggagacgacaaggtgcagcgaattagaactgcgagccattcactaagaaacaaaagtaatcccccggccacttccagacccttgtgtaggaaatatttccccgcataggaggtcaaggcgaagaatccctgccagtccagtccgtatacatcgattgtagcgagttccctacaccataacaaggccggactcttgttgtactattctgtatataaccttagaagtccactgcttattaaattcactatttaatgaacgtgctaagttgactcgcatcatacttaattgcctaggctttatcccattgtttagtagtctcactgcttcggctcttgtgtcttctcacgcacaagaccctcctgcgactcagaaggccgaaccgcatagggatcgacaacaacggaggcgaacttgtttgccttgaccttggtagcaaacagaatatccagttccgcataagtgcgacctttagcctcaggaaggcggaagaatgcccagatgaatgcaacgagtgccgtggcaccccagaagaacccggtcttgccagaagcgttccaggcggtcgggttcatgaagtatggctctagcacctgcgacaccacgttgatgatctggtatgctgtgcgcgcgaggcagactgtcaacgggcgcaggcgcacagatgatgtctctgatacaatggcgtatgcgatcgggccgacagtcagggaataggttaatagccagaagaagcagagtccggcttgcgcccacataatgccgttcgcggatgatgccacgtccaggataccgatcaggaagagtgttgcacaaaggattccctggccccagacgtacagcgtgcggcggccgaagccagtgatcagccaccaggagaaacaggtcccaacaaaggcaatggctgtgcacccgacgcccagttggaacgagcgagttactggcaggccagcttgagtgaagaaataggtaggtgaataggcgaatgtactaccggacagaatctgcccgacgaaggccatgcagcagatctcggtgcggcgcagatcaactcctttgaagcagtcgtagtaggtggtgccagctacaatctcggattcgagcttgatcgtgtgcaccatcatcgccagttgaccgttgatctgctcttcggtcttgctgccgcccagtcggcggatgttgcgctttgcgtcttctagacgatcgtgccggacgagccaccagggactctcgggtgcgagccaacaaaccaccatcaaaggaagcggccaaatccattgtaggccgaagggaatgcggtagccccattggtcctttcgttcgacgagtccgtagaggactccggatgcgatgagctggccgatggcccagcacaagttgacgtagatagtgaggtagccgcgcagcacggtggggcatacttcagatgcgtaggccggcccaatggtggcgaacactccccatgagagtccgcaaaggatctgaccggtcaagaggactgccgcagagttggcgaagaacgtcatgaagatcaaggcattgaggaatgcaagggcgacgaacattacaattcggtaaccgtacttggacgcacagtatccgttcaatataccgcctgtgatcatgtcagtgttcgtcctgaggtggtagtcgacagggaaactcaccgaagatacatccaaccgtactggccatgttaaggcccgtctgccaaggtgcagatacctgccatccgatagtaccgccataatcttgtccatacttttgattgaacgtggggtaggcgaagaagttgcccatcaggatggtgtcgtatccctccatgataatagacatggatatcaagacagaccacatcacagccttacggttctcgcgcaaggcctgcatcagagtctgcgtgtgctcatcttcggtagcttgcttggcctcggtgatggcaccatggcccagtgtgtcttctacatgattggcggcggtcttttccaccgcaagtacagtatcaacagcagatgccatgatgggcaattggacacagatagcggttgatgttaaccagctgtgctgtctcacaggatcccatcaagtctcataccaggggggactatcatctatatacaattcgcgacatctcagctgccaggacgatccatatttgcattagcgtgtatctgaggttgtggagaaaggaaaggtaattcagcgccggatcaccagactgcggtcagcccacctggcattcaggctaattgttgtgatggatagagtacggagagacatttctgagtcgtgcaatattcctgtcactgcgtctagaccaactctggattgtcgcacatgagggcgtgaaattcacacctatcggcaggaagaatatcgacaggggcaaattctgggattcaattcagccgccagtggtctttcctggggaaccgaggtttgggaaggcgatctgattggagaccacttagcgctaactccctcgtaatgtagaaaatgaagctattcccttcctgtaacggggaaaacggccgcacatacattttagggaggaatgccgtagtaaatccgacccttaatcaagcctattttccaattggaacaataatataacgaaccctgaacggtgttttgggccgtagatgttggcgagctccctgttggaatggggtagttgctctgggttggatcaacttgaaacttccggtcatccttcgcgcctatatttctttatgacattttacgttcaatcttccgtcttcaatcttcccaagtaggcgactcatgagtatggttaactcctctagccaatcagaccagtgtggtgatccaaaccaagtgggcttccacgggtaataccggtgtagatgtgtagtcttacggcagattttctgacaaggtgtgtaaacaagctgaattcgatagctgtatggagtgcaattgatgcacagtgaatgatgaaagtgaacaaataggtttggttgaggataattcaggcaggcgatcacagatctgatatgttaggaaggtacgatgggtaaccattccctcaacctcgagatgccaaggtatgtgctcgtgttcgaaatacgcggcatttcactgatctatgtcgcacacgacatgattttccttaccgccaccatcacacattagaatctcaggctcagaagcggacaaagatggtggaaccttgatctcgccgactcaatcactctctacaacagatcgacagctgcctggaagaaacgatctctttgtcggctctttcggcctttaccacgataactagcccttctgactcgtcctcaaactccaacctcttggcactgtgccagcgatttcagcgcgacgcagcgaaaccactagtatgcatatacgggggtataataacaggaaataacaaaaaacccaacagcaacaccgatgcaataagtcaacgaatacccaactcaactcccatcaatccgaatcaacgtcctaaactcattgttccgaatcctcgtctctggaatcatcaatcgcataacccaataatgcttcatatccgtgatgctcacatccctcccagctgagtgcacactccaattcgtctgatttttcgatccgagaaagacgccttcgactggtatcccacgacggtagtgtctgtatacctgtacaggctcagcgtttggtttgccccagacgagtcgtcctgtactggggtggtggtcaatccccacggcgtgccattccaaggcgccggcaccgggaccggaaaggacgtatgcttcgattttgttcaggacaccgttgcagcggagctgggttttgaggttgttgttgtcgcttacgattgtgatctaaatctttgttggttatttgttccccttcgtcggttatgttttcatgtatggaacaagtccatgcaagggtagcaacttacaaatccatgctcgatcgtgttgggtctgtcttctcgtaaacgtatgatatcgctgccagtctcaaagccttcgatgctgcataaccctcgagtcgcagttccattgtagcagctgtcaactttgagtgtccaaggcccggctatctttgtctcgttgttgtacaacggtagctgtgagcagtctgtgacggactcaatgaatggccctcgcttccctggatgtgcaccagcgagtagaaatagacacgcgaatacaacactggtgatcatgatgactgtaatgaaggagagtacaaaagaacgctgagtgtttgccatgttttcgtacagagaacgtgaatctttatatttctgccttcacggcgccatgttacattcattttcaatccgtcttctaagtgtaacagctctgagttcaatccagacaccgcggttctctatttctaggctgcaactaaccaagggctggtgttattgatatcagcccacttagcggccaaaatagacgatttcgcgtttcacgattggtggcgagctgagcttctagggcttctttttccaattgaaatgtttcattggacatcaaactcccttctccacatagtgtatccccactgcgatcaaaaggcttgacttaaaaagaccctgccgtgtctttgatctattttggaccctggaattgagacactcgctagaattttcaaaataccgttgcattgctcgccaaatcgagtttttgttgaagggtttgaaacccatcattccaagtctcccgtccattcccaacttcatatatattcataatctatgtcataaatatctcacgatatgttctagtatacagtctagtctactcacgagcaagaagcccttcggcttcctgggcgtactcggcgggcccaccatgtgacttgcccagggtttcagccatagccaaaccttcacgccgacccttgtccgcattaaccatccacacaagggggataggcagaaggatcagaagcgccatgaagaaaaatccacttcggatttggccggtcgcatcaacaagaacgcccacaatagccggcccaatgaatgagctgcccttgtccgtagcagcgtaaagagcgtagaacgcagcctcgctaccgggtggaatcatgagtccgaagaacgatcggcagtatgatgccagtcctcccgacacgactccgtggacgatggccagcgggaatatctcccacggctgttgtagcccgaacacaccccatttttttatgaaggggatgtaagcaagcaacccatagagtggtatcatctcaaacatgccaatgcataggatgatggtttgattcggccgtaggccgaagtaccgagatacatgtggccataggaatgcgcccgtcatgccggacaccgtcgcagtgatggagagaagtccgatcagcggtgtgctcagtttgagttccgtccgcgcgaagaggatcgccgttgcagagacagtggccattgcatcggagatcaggaaccatgctacgaggaacatgaggacttcgcgcagtttgatgactattttcacggtctcccatagtgatttccaggcaaaaccgatcagtcgtagccaggctcgccatcttgctgtgcctttggtggcgactgaatccaagggaggccccggtcgtgtcttgagcaaattacgagtgaccaaggtgaacccgccccaccagatgccgaccaggagcaatacgaagcgcatgggaagagtgccagacactttcacaagggaggtcttggataatgtgatcagcaggatgatactgatgatttgcacaaaaaccgccgcacaatatccaagaccaatgcctgtggaggagattttggtggaaagctgcagctccggggaggacgacggcggggccttggcccctagtccaccttctagtgagctccgtggctgctcttgtggctgaagtccgtctaaactatcgttgtcggcatcatcgctgccccaggcgttccattccgagttacctccgtctcgatcgaagctcgacatttccgcgctgtcatccgcctttccctcttgcagagatgggtcgttggcgacaagcacagggagataagagttcagcacaacaaaggatgaaccgaggcaggtcacaccgatgacgaccaatatcgatccgataatgaagataggcggcgcaatgaatatgaacaacatgctggcgagcgcaccggcgaatccgaataccataagtaatatcttgcggttgttctctatacatccaattggacaaatttgacgttaactcatgtccctctttcgcaccaaacattctcagtccggcgttctgcaaccataccgtaatccgccagcgcgctgaacgatatcagtgtcagcgcctgtatgagtaccgctagcgagaaggtgtacatggcgaagctagctgtattgacctcggcgccaaagatcggcaccacacattggccatgctcagcactatttgtgctgttccctgtggatggtccgacgcatggaagacggctcacttgcagggtgccgcgctcgcgggctaattgttccaaggtgagcggtaggaaagatcctggtggcgatcgataagtaattgattattttaggtttgcagatatgtcttcacgaacctacgccacagaccgcgaacacctccgccgcaatcccgtacgagtaccatcctaggatctcccggcggctcgttggggtggtatcttcaccggcataccgtggtggtcgctgctgtacgccttcctctggcgacgggggccgaaaggcagcagatatataggatagcatggagaaggttgtgtaaattctcccccaggaatccacaaatttacaagcccaggtacgcgcggatgcgggcggaagagccccaacgagcaacattgttgatgatgtcatcagatcggcaggatatacgcctctttgggaatgtcttcattttctataacaaagtatatggtagatactccgtacactgccctataaacatacaaagaagagccataaaacgatgaaacacaatatagcgcatgatcctcggaataaaagataacctgcccatagaacgggctgaatggcgatgagttcatccgaatcccgaatcgaatatatatatctcagaaggcctttgagcctgtcctctcatgatatatttccgatatctctgcgatctgaatcgatatcctctctaggtaggactgaggcgcaatattactaagttcggcgacgtcaacatgcagtcacatatactacatatatttaaccaggcaacagagtagtgcacaacgaatttcacgattatttcaaccagtcacccgtcatcatgcctgcttcggtgttcctccttggtcccggctttgtaggcggagaaatcattgactttcttctcatatcgaactacaacgtaacaacacttgtccgtcacgaatcagccgtgacagattacgccaatttaggcgtcaaaaccgtcgtgggcaatctggacgacacatcagtgatcaaggatcaggtcgcagttaatgacattgtcttctacatcgcgactgcagatcacttgtcatctgtccaagcaataatcgacggcatcagacaacgagcggcgcaagggctgcaaacaatatacatccacaacagtggagcaactttgctttccgataacgcccaaggagagtatagaagtgatatcgtctttgacgatgagcaacccgacgaaatccacgccctccccgattctgcaccgcatcgcctaatcaatctagtcatcgtcggagcagcccaagaattagcctcctacgccaaaatagccatcatgattccgccccttatctacggcatgactagtagggaacaccgcctgtcgattcaattgccgacgctcatccggtattctatcaaacatggctatgcgggtcagatcgggaaaggtctcgcagtttggagccagattcatgtcagagaccttgccagaggatatatgattcttcttcattggatagagagtgcacccattgctgagattgcgctgaatccgtacttcttttgtgagaacggtcaagagttgtcttggggtgaatgcgccgctgcgattggccatacactcaggaagacagggtgcattactaaatctacgccaaagcccattccgaaggaaaactgggatgatttgttcggggaatattctgggatggtactgggatcaaatgcacgaattagggcgaatcgacttcggaaattgggctggacacccttggagacggacacctttgcctccttggctgaagatgagattccaattatcgcgaaggagaccggggagttcacagggtatgcgagcgttgttgtgtcgtaactggaaccactcaaccgctgtgttttgccgtcgtcctgtatcacttgcacaagtaattaagactaaagacgtgctttggcctcgctcgggtactttgaattattacaaggcttccaaagagtaagatatgactgtctcaacggatttaaggatcgggagagaggcaaatcacaagttcacagaaaagggaagtcgagggacgacagtcgcacttgccgattccgggccggtatagggtaacttcccaatcgggctgcccctactcttccatgaaactcaacatcaagacttttgtccttccttcatcttcacacaaaaagacttcatatctgcagttctatcaaatccatgtgctatggcgattctacattatctcgaattcatcattggccggctactgtacccaattcgtggccatgattcaggccaaatcattcaatgcccggccttcaaagaccttcccgagcccaacatgaccctcgaagcacccgaagccggcccctcgggctctaaactacctctccactgtacttgcaaggccgctgatggcaagggtggtcttcctgaactgcgctggacagctccaagctgtcgcgaggaagtcaaggagtatgtactcctctgtgaagacctcgatccaccaatcccattccttgtctttcaccacggtctcctttgggctattccaccctcgaccacgaaagctgaagcggctgatgtccacccggatgatcacgccaagatctcccgcctgaccgttgctggttggcgctttgtgccaaacttgcttggattgccgtttgtcggcgctggtgcaccgctcggccatggaaaacatcgttacatcttcaccatcatcgcgctcgatgagtctctcaagttcacggctcccgagaaggtgacaaagaaagatatcaagcatgccatgatgagcaaggtcattggatggggacagtggattggcacctttgaaaagccctggcccaactaaatcatcatcaataccacttcttttacaaacacaactagtgtgaaagggacatcaggagcgggattgacgaaggagtccaaggtacttcggcagtgagtgtgtatctcattcccttacatttactagggttcttcatgtaagtatcgttatggaactaattccctaataacaatttatttttcggtcatgattgttttcaattctgttgtgcatttccaactaatttgtgcaatggtcaccagttgtagtccaagaaccctaggctagttcacaataacgtgtgtcatagctcacgtcagagcactttatattatccatcccagacacctgtttgcgatgttcccctgatgatgtcccaaatgtcccaatcgaagagcttctaaaatggtcagtcttgaaactcttcaaattctgtgcgagccagctgacacactgacctttaccggtgcaactcaacctatccggggagtttcgtgtcgtctattctgacctgctcattggtaaatgcagtcatgccaatccaataatttgccggaggtttttatgttcataatatctaccagctgggtgatttctcaacgattgtgtatatttatatacccctttgatcgttgcaatgcgagtaacagtcccttttggtttcgacttttgtcggcaatttccagcatgcgaatttctttacaaaccaactcaatcatcatcactcatctaacaattgctactactgagtgaccaccggaaatttagaatgctcacgagctctcgggttccattccacgtcttaatatacacacattttcaaccagcgatcactcaaaaattcgaataatcgactgcagccgacgatctgtctcatttgccatcaccaggtgccattttgaaggcgaggcccagtggagatcttgatggatgaaacggacaataattgacagatgagacagacagcggcgcatttggctaatgtcctcttctccccacacagaacaaacccccccttgtaccgaggtggtggccaatttggccctcaccttcaacgcccgtgccgctttctcaatcgccatgactaataaggtgagaatattagccctggcgtttgaagcaaaacatacttgacattgaaggatgaccactccctgttgctgcaccctttccaggtggagcaatattttattcggcccattcacctcctccgattgcatgacttcactaaatgcctgggcatagcaattgcagtgaagggaagaagcgtcttccggcagtgcctcaagatcaatatcttccagtgggagagattgactggaatcagtatctaccggttcgtgccagatttcactggagggcaagtccatgattctagccggattccgtactgttccggagacctgaattgcgttcggtgcgaggctgaacgggtaaattgcaccaccttgaaagagtgacccagactggatgtccggcgcagcggtgtggaggaacccttcaatggggggttcatcgaccatcaaaccgatgtgggaagtataacactgtgtggaatagtcaacacgcccagaaaaacggggacccccagaactttcgaatccgtcattttgttcaaacgagctatccgggctggtatcggaaaatcctggatccgcgcggttttcggcctcgtggtcctggatcccttgtccaatcttgtggtttcctgcgcgtcccaacggtcatctatcgacatctatatatactatggactaggtatgtgctcacctgcaacatccgagagcagatttgtgaaactcgaccactgaaagtttccctttggtggtgtaacttcagtgccggtgctagggtcgctcttgtacgactcttcccttgagctaggacccgagccggatgatgtagttggactcgggatccgactcgggaccctgcgcgccctttgcgccctctcttctggggctagcctcgtcggacggtcaactccctccacctcctttctacgcatcttgatgcctgtccctgctgctgccggccgaatcatctttctcttggccggccggcccaacggctgcgagattgaatagacacattgatactcatgactctcgcaacggtcacatgggtaggtgtggctacatcgtatcttcgcttgctggcaggcgttacaggttgtgcgcatcttttggttgcgaagtagttgaccgttggactggagagacctcttggtagaggtctcagccatgtgtaaattgtggaacagatgttgaaaggtttgtccgctcggactcctcaatcaacaagtatgattctccctggtcttgggccaacttggggtatttataattcatctcatgatgagttcacccacctctttcctagttgatattgaatgctgtcagcaacacaggaccacgtttgattgcactcccgcattcatcacgaaaggctgtttacccacaccacaatgacctccgtttacagcaattgccgaaagcacaagaagttacatggatcgaactttaccaatgacaaataaccttgtcctaccccccttgggacctgtgtgcgagtaccacgcttgtagtctgtgggggtgttgactgttcaaggatcaccaactttacctcaccatccatcagtgaacaattgaagtggtgacgtgaacttggggatttctttggatgctaattgattttagtaacgccgtcgtacggtattcacatttcatggagctaggatgcttccttacactagaatcaaacccgttgttgcacacaaaacagctgtttcctttctcgggcaacgtcctattctagttgctgcgtcgaacaactccagatggaaattcacggccatcattgaacaagaggcatgaagccgaactacaatatatgctagtcgatcgaggggctttcccataacagcggcatctatcaatcgatctgtctgttgacacttatttctacggcgttctcggagcatatgctcacctgataagccagttgcttgcgattcttatataggcacaacaattggtgcgttattgcggccttgacacgcatttcttatttctgatatgaacattttattacaaccatccacatctaattttctgatatactatacgaagtacgttgccaattgttctccaataatttggttgtccgatctcatttcaattttcgcagacaatatatgttccctatagtaaaagcttcatctttcacctcattatagctactattaccattccagataccaccatgcctgccatcaatccatccacccaccgtcaatggtggcggcagctaggttgatggcaggcatcgtggtaccaggaatcgtaatggtaggtataatcaagttataaacgaaccttttattgcttcgtataggggacatgaattatcttcagataatctatttatatattcaaaaggggaccttgcaacgcggacagcaagcgtaccgacagccctgcctgcgaaacagatgtgagagcatagtcgttactgggaataggaggggcgagagaggaaaacaccatagggaagtgaaaagtgtgcctcggggcttgtttttaatcctgtactattaccaatttaattatatggcgtgacttgattaaccctggtgaattagccctagctatatgatttcatggggaattgttgctcagacccccctgccttgaatttcagtaccgccttcctgatcgagtaccactcagaatgttccggccacactttattttttctgccatgtattctgcctacttctggtttacatagtaaaaaaacatgcattttgattagaaaaatcgtatatactacctgatttctataggaattagctccttgatgaatgagcagttgatgaagcagtcaacaataaagcagttggtgatgaaatagatagttgatacaagagatgacagaagtgactaaattttgttaggagtttacatacaagctgtaggtacctgctgctgtcttgctctatgtatcatatgcagttgaatacaaaaggaaggcggtactattcaggcagtgggcatccagggtgcaagcaaagattgggttagaccgctgtgccgacagtatcttacaatgtttatgtttccagataatggagagttccaaaaatagcaccttcgaaacgtggatcatattctcaagtctccttgaataaataatctcagtttccatgtccccatgcactatctcatgccaccaatccggctgtgctcgtgggacaatccacggaacggaacgaggtcgttgtcgcactgtcaggcatggtggttgtctctccctcggcaggttcatgtctgccaatgaaatagttcatagcaatgggagggctcaaccctgctgcctgaacaaacttcctgatatcgaatccggcacgtgcgctaatagtcttagggaacacatgtgcaaagcaatccggaaattgataggctgggggctgcgcgaaaaggagatagacgtaacgatgatgcgtgtttggtggtgcacgaggagctatgtacgaggctgccgggttatgtctgtccccgtggtcttttcctggaacgattatggaagggggtgacggctttgtacaatccatcattaggtttggctggtaccagtgtagaatgactgattggatatgggttcctggtaggatggcgtcgaggtcgatgaagagggtgatgtatttcttgttgcatccgaggttcttgctgctgatctcgggaatcatgctggcctctgggctgatgttaaattacttgattcaagccgttcgccatttgcatacctcggatatctaagtccatgccaggagtgatccattggcccccgggataccgtatttgcagttgctgactagggggcgaagggaacatctggactatgtctgttagaacaccaaagaggagtgcaagtggtgagatcatattgtgttttttagaatcaaccgaggagagtagttcgacaacatgtcaatcgggaatgcaatgactaaatcaattccactcggccttgtgattcaatttatagacccgctttccacaaatagtactatagtctcccgtgtatagtttgccgttgtgcatcagtttcggcttgtttcttgcgccattcccagcctttcatgtaaacaacacttaaaattggcgtgactagcgcaattgcgccagatacaaaacaatatgtccattggacaccaattcgcttgatcagagggttaactaaggctgcagcaccagctcccaggaaacaccgcacgaggttgttagcggccatcgcggtagcaggggtctcgtagtacaaatcaacgatcagaatgttcatcacgttatatgccgccgtgatacaaaagcaaattacgaagaccacagtaagggcaaccatgagtggtggctttaacggtatgagtactccgtacacgactattgagacagctgcaagtatctgaaaggaggaattaagtcaactaaccaactccaaggatgtctcagggcaacgtaccgtcattggcagaccaatctgcaatctcgcttgttcgataggaaatccaaggatgtcctgcttctggttcttgtgtaccgtctgaccggcattgcgtcgagaccgccggtaattccagtcaactaatactccgttgacagttgcactgagtaatgaccctaagcctgcaggaataaagcatagtccaatacccaaatcatctagatcgtagattctgtggaaaagcgcaggaattcccgccgtgaccgcgtaatagctgctgaagacaactccatttgctaaaagcaccagccccacaggtcggtggaaaagcagacgtagggttgagtatgggttagggacattcaagcgcctcctcggcacacttaatgcaggtggggtcatttcggaggtggtccaaaagtaactccacatggttcgattccatccgactgcagggctcgagccatttccgacaatgcctcggcacgtttcagggaagaatagcagcagcgggacgaagaaagtaccagctgcaatagcgagaaaccagaatattgcttcccagcccagatacttactcaacacacctccaagaatcggcccgattgaaggagcaagaatatttcccagggaagtaaagcccatgtacataccccgctcggcggacgtgataatatcggccgcgacagcggatgcaagggccacggttccactactgccacaactttgaacggcacgaagagctaagagtgctgggaagctgtgttgtagagcgagagcaatgttgccaaataaatatatcacgaagcaaaggatgtatgcaggtcgacggccagcttggtctgcaaatgaccctgttaacattggagagaggccctggcatatcttcaaactcagagaggtcagttattcgaacgtagtttgtagactctggttacttataacctaccatgtatgtcgtgatcgtcagattaattcgagatggactgactcccaagtcctttgcaatggaattcaatgccgggtagtagatattggccgataaaggcgaaaagctcgaagccagtgctgctgtcaaaataatgaggcgtttctgcgttggtgtgaagacggagtatgcctcggtgccagaaggggcacgcagcaagggggtttcttcatcaaccccatcgttctgctgctgcacttgatgaatatcttgatcgttcatgttggttcaaggtagaatgccaaacaaaaatttcacaggattccttctggatgtaatggcgaataaatacccgggtccttttgccgttaaatcaaccgtgaacccaatatcacagcatttcggtgaaggaaaatatatatgcattcaatgcgctcttacggtggaaaaggatcttatttctcgataaatttgataaaccgatatttttcaccagtcttcacaagaaaaagcagccaatgatatcggaataatcactctctcgttacatgttcgaactcttagatcttaggcctggggcccgaagttggctccgcatgacctgtatacagatgaataggtcgaaacagcttgccacgattgactagagcccgttagccaagataccacgccttcagtgaactggttccttacccatgtactctctccaatgtgccatgataccaataatgcggtgagcaagcattgccgccggaatcatatcaggctcgaaaccactaaatcaccgtgttggaacctgcagtcatcgtacacatgtcgcgagtgaacttacattccggtaaatacgaagttaccgtaaaagtccgcattgggatacaagccccgcgtactaaaaaactcatctttcgaagcagcctcttcgatcgcctcagcgactttcaatagcggttgattaacatcggtcatatccttgaggatactttggatgggacgcacgcgcgggtccattcccttgtaagtgcgatggccgtatccgaataacttttgctttccagattttatgtcttcaatgaaggctggaacattcttcggttctccaatgttacggagagcgagttgggctgactctgttgcgccgaagtgtaggggtccgtgtgcggcagccacggtagctattaggcaggacactgggtcggtgagagatgaggcagtaactactgttgagaagactgttagggccattccatgctcggcattcaggttgccaaagcggcggaaacaggacacgcgagtgggatctggtcggtttgtctttgggtctacaagaccggccatggcgaatagattctcgtagtaggtttggtggatcgatggagacttccagggaatgcctagtcggtgggatctcacggccccgaagaccacagcgtaagcagcgacagttcgtaggattatttggtcggcccgtttgatgtctctttggtaaatcgtcggatttgtggtcgctgggatcacatcgggcgtacaggccaggtaggctgaaaggcctgctagaaccagcggcagtgggctagtctccttgctgtgtatgtaagcgcttgttagaaacataagatggtggagatacgatcaaggaatcatcatacgggagattaacgatggtctggcgcacaatatcagggaccacttgcatatattgtgccagctgccggcgcaactcttcgaattgacttgctgtaggatatgttccccatagcagcaggtgaaacatttcttcaaagtcacacccccagagttggtctagggtataccctcgatacagaagtaggccgcgctcatgatcactaaccaccaatcagccagatatctcaagggcctttgtgtgattctcacgagaagctgataggtgattctgtcacggctgtgttttgcaatccgggatcataaacacgcaacccatgggcaacttggtctgcgcgattgctgttcagggaaggtgcccggatacgctgaaggtcggtcgcccgtactgcgtttcggttaatggggatctcataattcgcgttagtgcgtgagtcacggatgaatagaatgccagtcgacattttgaaccagaatactaagtaaaaatgaatttcggtgtcggagtttcgtggggaagtttcggtcaaatggttgttctgtttccttgtacgagtcaacgtcgctgattgctggccctgtcagagaagacatcacgtaaggcaacgtatgaagcttgccgacaaagatacacccggtacggagtactactggcattgaactctacatggtcgggctgtgtcagggatatgtttaactattctggaaactataaccttgcattcatcattatcactcgttataagcacccattagatgttttcttttctttagacagccacaacgtcccgcatttactccggcatgtgcttgaatgggtgggcaagggattcctggcagaaaggaagcttgctgaccgtccagatctcggtgtcctacattgagcgaggggtcagtcacactctggtgaaagttaaatctagccctaacttgtgacacttacgggcttcaagttcttcttgatctcagtatccaaagtgccggccttgatggcaatgatatcgggagcggcatcaggatcgtgagcgatcggggaaccacactcagagcagaagatgcggtggacagcgtggccggaggaacctttgccagcccagctcttggtgggacccttgatagtcagcttgtccttggggacaacagctacgagtgctatacaaagtcagcaattgtgtttctccgtgggtatttacgcaactaacaataggtcgagccactctggcgttggcagtcatcgcagtgatcataggcagtgaccaaaggagcgtcaatgtccacggtgtacgtgacggctttgcaaaggcagtgtccggagagaggcattgtgtatgaattgatggattgattcttccaaggtacttgtgattgaggacctccggagatgggtggaacggtatttaagggataattccccccaacattggaagaaagttgaactggtcatggtcattgatatgtcaagtcacgaatacctgctttttcctttgctaatgctggtgaaacaggtacccggtacctaccaagttacgtcatagctacgctgtgctttgattgagctttttccacaaaatccaccaagtttgaccgattcaaccagtttgggcaattcgaattccaaatagaaaggtcgttcgggatttcaaatcggctagttctcttttttggcccctgtcagcccaaaagctgcaaggcaatgacaaattattgtgccccgccagagctctatgcaaggctttgggaaatttacccctccacaaagactcaacttagcgtgccactcatatcaagtctcactcgataatgctgatcgagctccacaaatcaccttgacggtggagatacgacccgccttatccgacggtgccgactcggtctccttcgcattcggacgctctccgattcgtataactgaaagccacaatgtgtgttcaagctgtctcgagaacgaaaatcgcttaggcgccacaattgagcagttcaatcattcgcattaaagcgaagatatcaggtgataagtctgctagcaattagcacggcttacagtggagcatatgtgctagtgagtgagctgaagtggagaatattgtgagtctacaatttgttctgcgatctgcgttgtgatcaaccgctaccgacccagacgctagacagcagtaaggagctaggttcgtgatccggtgacctggtataaaccggtacatatttgtcagtttatgcaatccgggcaagaagctaaactcccgaggatctgtacagagttcgtttaatacctccgcggtgagctcgcttttgtactttcccaattctcatgaacatcagagaactgggtcaggcctcaaataacgtagacgatatcccagaaatgttcgttgtcgagtcagatgtcatgtagctttgggatctttcttgatttgtgtacatagtataagttaaagtaggtttaccaatgtgtttacattggtttgtacaatatatatgtacaactgttggttgtgcgcatcgctattttacatgacagtatcaaatgttatagctgccataactacctcgtcgggcattgtcgatcttgtccgctgcactctgcatgcgcctgtcagataccgtattcacaaagtttaaactacacttacctgcatctgagctgccattcctccccgaggattctgaccaccataaacactagcctcagcatgttgtgcgtcacgggcatcatctttggtgatatatgcaggcacatcagcgacggctgtgagccccaaggcatcattactgtcggcaatcgaccgaatctgggcagagatgtagccaactccaggtggttggttaaatgcacgtccctatgggaccttgcgttagtaattaatttgacactcaatactttcacgggaattccctgacctctgtggcttgaatctcctctgcatcttctatcgagatcgcgctggatggcttccgcgatatctccgcgaccttattttcgaaattcatctgtcgcatacaaagactctgggccgttgctataatcggtcagtcgtgcgttgcttgaagacgcaatagagtttatgcttaccagctggtccacctcgggaaggtccgcgtccagtcaacgcgctctcagcctgtgagatggccgaaacatcatcctgtgtgatgcgctgtcccctctcggcagcgagctggatttcggcgacggtgggaatatcaaaattcatggctgcgcgtatctaaatgacatttgtttttctatttcgcttgatctcacagcttgttgttgtactatatacttcgactttagagccggtgatgtcacggtgaggacatatcaatcgaccgaactttgcctttcctcgtcagtggtgggggcgttgagtatatgcagacttcgaatagaacattcgacgcttcgaccaaacagaaattgtggggggatgcgtgataccccaattttgccatgtcgccaggcccctagcacattattccaaatcatcatcacctcgtggcacgatgtctgcaggaccatgcacacttggtacaacgcagccatgattatctggagatctccaaggcagaacatattgcttaaatctcgttgactagttatgttttagtggttggccccttctcaacggggtagggcagcttctgagcgccgttcgcgccgttccatggacgtcctgctgcagattgcccctgtcagtgccaccgctaccaaacccaaaaaggaaagaaaggacgtcgaataagaatcctcaggacgagccaacttccatgccgcgtcaccatcgaccgctctggccgaacgacggcaaccgaatatccaaccacgagatctggagagtcccacgttgcgtgacatggcatgatagcccaatggacccttgtcatgagtagcacgcctccattaagcttcatgctctgggtggtgtcagacacatggctacgagtctaagtcacggcaatgtacctttggccgatgtctacgaaattgctcaaggcagtttaagatttccagttagcaaggggtttacccaggagctctgtaaaccatacgatagtcactgttgcaagaccatgtcccgcatgagacctcatgagtgagggtcgatggggcatcattccggcgtttattgggacggacccggagatcaatttgttggaattgacataaattctgtagtagtttttgggctcgtgtaagaagaattgtgcattgattttgacatggaatatgcaatctgatactcaatgtagaaattgccgcaattttctaaattagaactcttacaaaccatacttatgaccgaatatttaaaataaggagaggcatgtagctaatcccgtggtctcaaggaaactgcggtagtaatagatttgacgtcataggctcttgtctgatagtactcggctagactttaaaacccccaaattagggcagtcagttcatttgagaacagatcgagaaaattggaagacataccacgtgcatcaagtaaatctgacttagaacattgacactaacgtgggtaccgaagaaagtgtccgcgtaaattctttgcttgatgagtgacagccacaggtgtagcctggcaggaaccgttcagcaggccagctggtctaaccctctattttatttttgctttagatcgcgtattgatacattgcgatgacgtatattttcttactccccagttaaaccatcactttgagctacgtacataaagcgacgaacagtttatagccgagaacgctatcttatttcgggctacggtacctttcgtatctccagtcatgctttccagtcaggctatctcaatcttcaggcagacattggcaacttgacattcaagcttgagatcatcaaatacatcacctaactcctctccatccgcgaggcaaatgcctagctttaattttctaagattcactgaaaagttcacggcgcgcaagagtttcaaaagctgcgatgatagctcgaggtggtaatcaaacataatgtctgtgatttccagattcacgaggcaatggggcaagatttccgtaagtggcttcatatcccagttaagtatggagttatcgggagatttcatcagatgatcatgtctgactttaagtgtttcgaggacattaaagtctttaaaagatccgaaagggttttcaacaacatccttttcagcaaccacttgatctttatatgcatctccatagccgatgcgtagggtcttgagagttgttgtaaatggaagaagagccaagcggaatttcgaggcatcgaactgcttctcctcatcgaggtcatattcgtctgcctgtatctcgactctgatggaaatgtgctcaagatgtgtacacactgcgagccagtccagcataccgcgacaccagtaaccctcttccacagtaatatcctggacagggcacacgtcttggtaacttttgaggtccatatcttcatcttttttctcgcctattgcggttccgtagatcttgcggacttgagggaaataaaagaaaggctccacaaagcccgaatcaatccacgaagccccccaggcaacacaggctcggacctcttttaagtgaggaaacggcggctcgtggtgaaatggctgctggcgtttcgccgccttgagcaggatttcggatacgaggtcggaatgttcatgctggaactcaagaattcggaggttggttagccggacaagaaataggcccaaccatgcttctccgcatattccctcctccccatgaagatgctctgtccacaattccttttgctcttgctcttccgtggtgaagatgtcttccagcgcatgcttgatgaagctttgcatctcgtcgttcatttctaatggatcatgctggtcacattgtgaccagcataggtcgagtcgatggacttgtctggcgagctccggttgtctccacatacgcatgattaagccgatgaatgactctgtaaaattgtccgaagatatgtatgaatacatcaaaggcgagaatagatcatgaaatcgtcgacaggtaaggcttagcgaatgcaaggtagactgagcgcaaccatcttcctgggcgtgcttcccaatagctagaagaagttcattcggaagtcgatccattttgaggaaatgtgcactctggtgattgacggccttatgaaaatcgtgtattaaaaaatgatgaccaaagtgacggagggccctttcatttaaatcagatgttacactaggcccttccaaatcgtgcgtacgttttctgtctcaggtgagacagtggatcgacgcttggcgtttaagactattgtcttcgcgtttttggatttcgataccgcgtcgaggctagatgtgcaagaggaaggaaacattggatgttcgcagtcgatcgaaacttttttcactttcgctgcctagacgataggtccgctaaccattacccactaatcagcgaagatctagcagggaagacgaactcaggattggacaccatgggagactaaacagggttttggactagcaaaaactaaaatatttaatatcagaaaattgcataccttattcttgtgtcccttgtctcgccgaacatgcaccaacgtatgccaagagatccaaacggtatgttcggtgaaccaggattttcttcataagctgcatctcaaaaactaatggtctaagtgttcagttggtcttttatctctacaagaagctatttgatcatctaagaaggccgatacggcagctgcgacatgaagagtttatagagttagtttatattttcctagctaggcaggtacaggtacaagctaaccggtgtttgagatataacagggaaaaaattacggaatttctgccgagtgcgttagacactgttcaaaggaggtttgcgttgagtgtataatattttggtacggtatgtgtggtgttaaaataggatatatatgtctgtagagtacaccctaggaaagagattgtttaagtctgttcatctatgcagctcacctagtatttatagacatgttttgtatactcactcagaagtgagatgagttgtggtccccttctatgaatggttccacggataaacacgcttcataacttcaggcctgataaatcaggcaatatgatcctatcggagtaactacgtaagcagaaatcaggtcatgtgggcccgcctaagacctcacgttgatacccctagtttaggcttatagaaatgctggaaatgtacggtatctttgtgattagatcatcccgttttagtatgaaatatatggtatatttacaagggatttctacgggatacatccattcttatatactagttaggatcgttcagtcgatttcagggcacagtaccattggtatttagtctaaatatgaacgactgttagttatttctatcttttcaggtaagcatcacatgacccatgcccctcaaccctccgcgtcagaccaatcacaaacctgccagaaccccgttaccgggattgagcgctaccactctgttttcccctatcctatgatgaaaaaaaaatcaaatgaagaggataaacagggtgtttgatcacagctttcgcttgatttgtgacctacaagcccgataagagaccgtgttcgcccaggactcaaaaatggaggtgtatgagcatctattcgaaggttgttctgaaaaatcatgctaaggtaaccatacacagattacccaaaaaaggaaagaaggcgtgtactatgtgccgccagcaaaaggtacggctgacttccccttttattcttttataatgtattaactccagtaggccaagtgtgatgtctggcgggatgagactaaagcgtgttcccgatgccgagaccgcaacctcgaatgcaccatagatgacagcttcacaagagagcacaagcgtcggtaagagcccgaacccgagtaagacggagggaatccacttcttatagttctccaagccgatacatggcattagaacacgagaataagcggtggcgccaacaactacagagctcacagcagttgaactccgattccgtgccgattgcgttgcccacagcgacaacggaattaggcgtcccggccgtgctgaagtcagatggtcaagtggacgattcgcagggtttgccgctaccctatccccaatatcctcttgcaccagcgagctccacatcgggtgtgatgatgggaggggatgatccgacgaagccccgttcactgaaaagccttaccgttacaggcgcagagattgatgacctttatcaattgtagatgtcccccaaaccttgcggtccacaaggtgctaatatcttgcagattcttccatcattatgcctctttcctcccgatcctcgatgcgcagaccaagccgaatgcgtactacgcgcagtctccattcctgttctgggccgtcatcggcgtagcgagtcgatcatattcccgaaacccgactttgcagactgcgctggcccaggaagtcacggaaatggcatttctgtcggtcatgtcgacgtgcgcgccgtggcacatcatacagggactattgctcctgctgacatggccgtttcccaaggagaatcgcccagatgtgacatttcctctcagcggcatgcttttgcatgtagcgatgcaaaatgggttccatatcccgatgtcgagccatgaattttcccgggcgaagattccggccccatcggagttggatatggtccggcgctcagagctctgggctcattgtgtgctggtgtaccaacggtgggtttctttcttgcaaattgcgagcaaccgaaatcatcgtgctgattcgtggcagatcttgtgtgatcaaagggcagtctccgcaaaatctgttcagtttggcacaggataccatccaacgccaggtactatttgataagattgccccggatctggttcagaaactcaagtgccaggatgtcgttgggagatgcagcgaggcagttatggagaatggagttcgtgccatgtctctggaccaggagctggctttagacattctgctgcggaagtatgagggagaggtagacgatattgcactgcaagccgtcggtttgtttctcacatatacccctggcaatagtccatccactaacgcttgtttatttattgcagatgacgagaggtatcacattctcctttgtcgtatgtcaatccacattttccatttctacaaaaatcaaaccctcgtctctagtggatgtcttccacgtcttatcgccaccgcttgcaacttgatagactatgtccaagcctttgcggatcgtatgggagctctcttcatggcgcctattcaaataagcttcggtctgctcctggcctcgatatcactgttgcgaattctcaaaagtgaatatgcctctagcggactcgatacgagccgtgcccaggcgtctttcttcgccgccatcaatttggctaagcaaatatccaccgacagaagcgatatagctgctaaaacgatcactctcctgactcaactctggaatagcagcaaggcattccgcaaatccgatggctcggaatataccgtacttcgaattcgaagtcgcttgatcctcagtcagatcttggatgcagtatggtggtggcgtgatgaatatgaccctaatgcgcgcatgaagatgcaagcgttggagtctgttgacggtccttcccgaaccaacatgcttccaggcattgaggcagggcgtgctatgacgggaacagatcccgctcgggagcccgctgggggaattactcagaacttgggtcatttgcaaggagagttcgagatcaacgaggattactttaccaactttgagtggctgagtgatgaaattttctcatttcctccggattcattgttagcaaccaacttaccgtgagagcataagttgacttcgaatctattaaggacccatgttacctttacattttcctccaatcgcggatcacgcctttcctgccgcacatatggagctgatatcaggcctcggtatctattacaaccccataattgccgatctcgggccattacccttgtatgtgcaagtgtcttcggcttaacacccccagataccgcagaccccacctcgggatgtcaaaacaaagatctcaccaagtctacgccactagaacaagcaaccatggaagcaatgcttggtagatcacgatgtacgcgtggcctcccagcccggggctatgaattctgcaggtgccttttaagcactccacttgattgatagagattaattgcctgcgatcggccttaagctcgattcgggggatttccggtgaattagatatggaatatccacaaaagagtgcatggataattttaccttgacattgcacttatgttaaatggcaagcaaccttggaataaccactgcgtactaggtggctatgtacagagcaggcaactacccctgaacatgcctcgttaagtgagattgaattgccggtttatattaaaggcggtcggcaatacattgtaaccccgcttaagcctcggctccttatctccaagccttcccccagcttttgcttctctctctctttgtcataggaattatttccattggtcaatatgttcggctttgtgcaactaccccggtcaagtcgaggcgaaacccatgttagtttacggagcacgggcacggagtacggatactccgcacagagccctcgatcgttccgttcatgttttctttcccataacataatatcaattcaatcgttagatggcagtgattattcctatcacgcgatgtacccccatcacttggcatatttcttggcatatatctcgggccaatgaggagtatcgattgtaagcgccctcctcaaacacccctgcaagtccgcggggcctccggtttgagacatgatagattcgaagccacctcattcgggtggtatccagtcaatcatcccagccatagaagcccactagaaaagtctccccacacattgttccacagtgcttgtcttgccctacctgagttggcaattcttgtcacccgctaatcatattagggagtccgagggagtccgggaacagccctaagatgggatcggacaatctcacaactccattattagctccggggccatggcctaaattcgactaatgcccaagataagaggctattgccggttatttgtattgcaggggctacaaccatctttgtatctattgggaatatggcctttcaccaaaaccgattagccccggagatgggccaacctggctgaaatcagacacatcggttggttggccactcattttagctgctaatttagcgtccacgctaagttcataacggcaggttgaccttctaaggttttttcctccgtgcgctggcttatcactaacaagctctcaggggattgcttctatgtcttggaagtaggatgtacatggtatagacagcctacgctgtctagaattacttggaaaagtgactatgctgtatgcttcaccccctactaatacacctcaggtattttatgtttcctatattcctctgtgaaatcccctcgaacgcgaactgggctggagtgaatagtcccatgtagtcgaaggtaacccaaggaacgccaccaagtatctagatgctcagatacgatggatgttctccggattatgcataaagagtaaacatgagaggtctgtgggctaccgggccaaaacaaggccaaatcacaacgtgggatgatattggtcgttgtcttgttatatgcacattgccactttccgcctcaaagcacctgcctccagccactcaagtctcgtggctctcgtctaaccatctctcacttctctacacccctgtctctcttccccccacttctttcttctcgtcgaatcaattccctaggtcgtcgctcggtctcatctcggttcgtgggttacatccactccaggataagcctgagatatcctctttgggcgataagacggacttccgacggtctcagtcttcgatcagctttaaatcatattcgaaattccctgttgttgctttcctttttctcattcctctcgtctccctgtgaagttgacatcggtactccatacgcttcaccatggagaaggacgagtctatcgccgtcaccaccggcgcgatggtcgacgagactgcgcctgatgataaactcaagaagctgcgtgatatcaaggaccaccatcactgggatcctaacatgcccgaggatgtcgttgaggaactcgatgaggcattacatacatccgacaagcatacccaagaggtcatcgctcaggaactcctcgagaactccccgtaccccgaggttcggtccgctgtctccaacgtcgatgagggtggatcagtcaacactattcgcgcctgggtcattggtcttctatttgcgaccatcggctcggccctcaacatgctgttctccatgcgccagccttacattgtcattccctcatacattgcgcaggttgtcgcctaccccgtgggaaaggcatgggaatggtggatgcccaattacaccgtccgtatctttggctatcaaaccgaactcaaccccggtactttcaccaagaaagaacatacaattgtggtgatcatggcaaacgccactttcggtggtggcgccgcctacgcgacggatgtcctcttggctcagcgtgccttttatggacaacgtttcggctggggcttcgagatccttatgtgtatctcgactcagatgttgggcttcggcatggccggcttcttcacccgcttcctggtgcagcccgccgccatgatctggccctcgaccctgattaacacctccctcttcactgcactacacgatgtcgccctgccggatcccagcaaggtcgctggctggaggatcggcaaatataagctgttcctgtacactatgattggctctttctgttggtactggttcccaggatacctcgcaccattcctgagtatctttgcctgggtcacctggatcaagccccagaacgtggtcatcaaccagctcttcggtggagcgaccggcctctcgcttatcccaatgacatttgactggactcaggtctctggattcaacttcagtcccctgattgctccttggtatgccatctccaataccatgatcggcatgtttctctggttctggatcgtcaccccggccattcactactccaatctcttctacgctcagtacctgcccatgagtgactccagaagttacgacaacactgcgaatgtgtacaatgtcaccaagattcttactccagaattcacatttgacagtgtgaaatactcgaactattcccctctcttcctgtcgacgacattcatgctgtcctacgggctatcctttgccagtattatcgctgtgctggttcagactggtctcttcaacggtgcggatatttgggctcgattccgtcgcgtcggaaaggaggaggaagatgtccacggtcgtctcatgaatcgctacgctacagttcccatctggtggtacttgggtgtgtttgtggccatgactgcaattggctttggtgttgtactgggctatcctacacacatgagctggtgggccttcatcatttctctgctcatttccgccgtttggtttgttcctattggcatcgtcaaggctgccactaacatcgacatcggcctcaatgtcatcaccgagttcatcatcggttacatgcagcctggtaaacctatggccatgatgctgttcaaaacttacggttatatcagcatgtaccagggaatgtacttttcacaggatttgaaaatcggtaagtcccgtcgctggctatctagatacattataccaacagtcctcttccattaggtcactacatgaagattcctccccgcgtgacttttatggcccagatggtcgcttgtctgtggtcatcgctggtgcaaatcgccaccatgaactgggcactgggcgcaattgagaacgtttgcgaccaggcacagcgtaaccacttcacctgccctaacggtcgtgtgttcttcaatgcctccgttatctggggtgtcatcggaccggcccgcatgttctcgatcggcgagctatactcgcccttgatgttcttcttcctcgccggcgccatcctccccgtcataatctacgtcggcgcccgttacttccctaagagccctatcaagtatctcagtgcgcctatcatcttcggcggtgctggtctaattccccccgctacccctctgaactatctcacctggggtatcgtcggatacgtcttcaataagtatatccgtgaccgctggcgcgggtggtggatgcactacaactacgtcctgtccgctggcctggatgtcggcctcgctctgtgcaccattctcatcttcttgaccctcaacttgaccgataccaacttccctgactggtggggaaccaatattgccgccgacaccatggatgtcactgatacagccattcgggtcccgctcgctgaaggagagacctttggtcccaccaagtggtagacaatcggacctattccatgttactttggttcccttgggagccaattatggttgcaattcttcggatatccgtttagttcagatcagacacgaatattcacgatatcacagtaataacattgatttatgttttcctcaaactttctgtatctaatatttcgagttcattacgtggctcgacaggagcctaataatacagcgaaggaacttatttctatctcttcactttccttacttcctttatcgcaagcagtaatttcaaaatccaaagatagcttcaaatgcaagatatataaaaatatgacacatgtgtacacgcttatcggactgacgaccaccaagactcaaatgcaaatcgaaaccgatgaaccaagaaaggcgaccttggtcatcagcacataccctcagccattcttgatggtaatccaaatatcatccagacttcattccattccaccctaaatccaaactattttaatcctcaacatgcatattttatttcaactcaaacccgacgacgacgcataccaacctgcaaaccaagcggcttgcgcaggaatccctcacgcgtctgcatagggccatcctggtgcatctcaaactcgaagagccggaacacagtagcacagataacgagaagttccatctcggcgacgttgcggccgacacaggcgcgaggtccgtggctgaatgggataaaggcggccttttggcgtgcggtgagacgctccggattccagcgctcggggacgaattcttcggcgtcggcgccccagatttccttggagcggtggatcgtgtagctgggtactgagagcacgtcaccggcttggaaggtgtgtccgcagattacgatgggcccgaagccggcggggatctcgcgaggaagtcccattgaggatgtgctgtggatgcgcatcgtttcccagatcacccattggaggctgggcgtttgtcagtttgggttaattgtgtgcgttgatggggtgtgggcttactaggggatttccttgaccatagcgtgcgtgggaacttcaatgtccttagggagggcgtcgtccagggtcttgcgcagcttggggataacgtgtggggtgatcatacaccagtagaggatggcacaggtggtgttggaggtggtgtcggagccagcaatcagttgagtcagggcctcggcggtcagttcggcgcgttcaagctggttaccgttttcgtccttgccctccataaggcgggcgagcaaatccacacgggtgttgttggccataacctcgggcttcagacgctcgttgacacgggcgatggcgataccagcaaggtgctggacagcttgcagaccttcgtagaagaagcggtccgggatgtacttggcgaaggggatgagggacggcatgcagccaagggtggcagatacctcgccacgacggttcagaacttcgacagcggcgacatacttgggagggtccttagggtccagacgcatctcagcaatatcctgtcccttctcgagcatgccgaagggagcaccgaaagccaagtcgccgatgatatcgaaggccaggtagttgaaccagttgagggcatccaagctaacatatccggtcttggggtctccctggaggtcggacagacggttccattgcttcacaaactcctcgacattgccatggatatattgctcgaattggccaatggacttggcactgaaagtgtgggaaacggtcttgcgtttgcgggagtgctcagcacggtcacgggtgttgaacaagccacggcggatagagacgaaggcatcgtagaagtccctaggatatcgtcagtttgggtgcagttttcctgggctgcaatattgacgtacgctttcaagaagccattgccgtgtccatagacgctcaggatagcttcgtcgtcggcaatggagacttgggtaggtgagatgcgaacaagctttccatacttcttatgagcctcatcaatcgtcaagtacttctttccctgacgggcctgcagcagcagccaaacgttggtgaacgcggcaaacccggcagagggaatgtcgcgcaggtgcgacttctgcaagtacggcaccaagtaataggctacggcgaggccgagaagaataaaaggaacactctgaagtgtcacaaacatagtgaagtgctgtataggagtgttggacaaaacaacacggagaaaaaaggtaccggcccaatgcagacaggataatgccgatctgaatgcagaatgtaaggtcaaacaagaagaatcaagccaaatccatcaccaagcacgcgtatataacctatttatgaaaagaggacgtgagatcatcgaatcatccccgagggtaaggaaagcaacgggaagcaatttcggtagtgtggagttcagacactggcggcgaagatccgtggagagtgccgtctcaagcctccgaagctcccgatttcggttattgacatgggggttccagacaaatcaacggccgcatattgacgatgtggtgactccattctctgtatggcgtaaatccttggtgcttgatttgttgaaatagagtgcgggggggatgacacgaggcgccacggacgccagatttataaggcaatagtatgtgtcatccgttctagtcagccttggaggtcgggcatcagcttacgtcagatcgggcacaaatccgaatcggggtatcggtatcacttgcagaactcggtgagaatgtgccttggcatgttgtatgtacatattaacgttgaaaatgtagatgcatggatatacatgaattaaaatggctcctcacttcccatcttcattaatgatgacgggcatgatcgtggcgatgactcatgctcatcaatccgtgcgcccccaagaagtcattgatctgtttataagccccggtggcattatggtgcagattaatagcatggccagtgtttggatggacataggcagagaaagcactggccgaggggaagatcatcttggcagcagcaggaatagaagccggtttcccacccgtgtgcaaacagtcgcctccacagaatggcacatcgttcgcaccgtcaatgacataaacagggcctgtaaaattgctctgggccggtagaccagtgatagtcaggagttcaccgatggtcatgggctgcttgttctcttctgcaaacttcagaagaccggtgtcgaaatggggcgggtagaagaagagatatacattgctgccgatgtccgcactcttcaagtacccagctgtgtagtccgagttcttgccgttgagacgggcttgctggaagttggcgccgctgagaaacataggcatatagtctgcgcttgtcgaatacccagtgagcacgagcgcatcggaaagctctgggtacatcgcggacagagcaaccgtctgagcagagccgaatgaatgcccgacatggacgatcttggtgggagtcttgatattagatatcgcaccgttgcgcaccatgcgggtcaactgggcaagggcctcgacctccaagaatgcctggatctcgttctttgcgtcgccatgtgaggagttgccaaggcccagtcggtcataggagagtgtatgatatcctcgagacaagacgtaatctacataggaatatgtatagttgttgtatggtagatcccaatatctatatttccatattagaccccatatagagaaatcaatttatctctcgaactcacgatttgtcaaagcccatcccatgtgtgaggatctgaagcgtgtaggccgagttcccggtattcttcggcatgcagtattgggtcgagatattgtagtggcccgacacggtagcatagcccgacaaggctgtttctgatagatttctaccctgtttggtcgctgagaggacgaaggaagtcgcgtcaaagtttgtctggggcgtgctgatgttatcgaacacgccgttgcgagcagtgacagggacctccactgttacattgtaacaggtcttcgcagcggctgcaccagccgtcaaagtccaaagtccgattgttgaagtacgcatcgtgaatgaattttaggtgtatctctgcactcgttcaatgaacgcaaaggggagtgtctccattatatagaatttccctcagaaagctacacttgcgacaaaagaacatatcaaaaatgcggcaagtccatttcgaaaaagtcggccccaagtgatttgtcaaaaggctgtgattctaaagttagagtggaaccgtactaatgcatagatcgatagcgcaggcccatcaaaggttgttctccggtgctgagcactgaaagcgtcttggacgttgaggtatcaagtccttaacaattgacataatccagcattagaggcatcaatcatcgtctacatttgatctgatacctcagtctgaagggggtgaagatgtataagtttgccgtgctcgctgcatactgtcgatccgaatctaaattggaacgaatgatcattcacgatctctcagtcattctgatccacttggcccgagccctaaaaatgagaactcaatgatcacgggtttctaccgaggttgatcataacaggctcttggttggtattggaggataataactcagatggaagcaagaaaccgagtgattttcaaaattgggactgtgaatatagagtatatatgctgtcgagatagtctaatagtagtccactttcaggggaattagggttctttgaaaaacggtcccctgaacagtgcattagcgagaatatagatccaactgctgcgatatatacccaaatccgaggaaacgatctacaagacctaggctttcgtttggtggagtagtcgatagagtctgaaaccactaaagatgcaagaaagaggaccagagcgagagcgagaagaatgtagccgtgcacacccgaaattagatacaaatctacgctgtcgccatgtaaattccaatgcgataaatcgtcgtataaccaagttatccataagtcatatgtgcgagccgttaatcaccagcgatcgccagttacagggaacaacccgttcttcttcttttcggcatcccaccgctctatccacaccttcatctgatcccggctcttctggctgccaacatttaccgtcgggatgacccgcccgatacgcaaagcgcagcagaacatggtcaactcgcggaacgaactgtgttcactgtagggcacgccaaagcaggcactttctcgcgtgctgccgcgctgcggggtgaggtcttggctggtgaatggtgacttccagtgttcgccgtgtagtacagtggagactggtggattttgcactagtcgcccggctggtgggcggtaggtccaaccggtcggacggaaaccgacaacacgggagaagtgtggtttgaagccgtcaaggtagtctgccagtgtgtcggcgcgaatctcaaagagggtttgcatatgtacttgtgcttcgtgaggattgctggtcagcatcgcggacagctcggggtcttccaagcaggcgcatattcgttgctttggtggagtcgcgaatatcttggatccaagtgctcgggcgattcccatgcatatccgttctttgccaatgctgtaagtgccaatcactacgagtagtcgacctccaacctgcgagcctttgtccggtgctttgttgttccccgtggcagcggagaggaatttgctcatcaaaccatctgtgctactcttccctgtatcatgtccgacaccagcctcctgattcaggcgtacacatagctctgaacacgctgtgatcacatcttcctgcgcaggaaagccatattttgggtttaggtatgtagtgtcgaggtaacatttgtcgatgtgttgttgtctcgacttaccagtgaccgggttggtcacattagggcgcaggagcggatgttgcacctgagcaggagatgcacggaagtcaccacaatgcagcacccgctgattatgcgcattgggcccattcccagaggtttgttcgaaaagaaaaagtgagctacccgggcaatgatttgcatgtatcatggtgacccgtactccgcctgtctccggtacttcagtagtagattcgaactcgaggtcaactatccacttgggatcaacgcggagctgctgtcggacaagattggcagtgggtcgactgcagtaaatgggcccatggcaccaagacttgttgagtcctatgtagtgatcgctgtgaaaatgactgaggaagtaggcgttacatccttcgacggctccgtagcggaaggcatcaacgcatatggaaaaccccgaaagaattttgtaaaatggacaagtccgttgataggcttgtttgccgcgagaagacacttcgtttgcggctgcagcagcccaagcagtatcttctgcatttccagccatcattttcgagaatgcggaaccaccaatggctttcttctgcgagtagggatcactttgcgcaggccgggcaatggcagcgcgttctgcgcgtgtcatccctttgtcgatgtcgcctgggttggaagtaggcttcgccctaggcttaggggccggtggagccgggatagggtttgcttggccatcaaggcagccgttgacatgcactccaatttcctttgctgggaattagcatttcagtaggcccaaaacgcagtaatgagcacctacccattcttcaagatcctttagcaccatttgacagatagggcatgtgctcacttccccctcaatatcttctacaccagaacagtcctttagatctttgtcaggatctacctcaaggtcgatctgctcttgttcctcgccctcccaaggccaatttcgaaattcttcgcctataagcccgtcttcttcttctatatcgtcaaaattcgcgaattcatcattatcggcattactcgtggcggctcttaccagtggcgggggtataggttcggaagtgcgttgtgtagccactattttatccggttgcaatacttcgttcgtcacagtcgtcgtgacagttgtagtttcttggagctcccgataggcttccatatcctcctcgctgtcggactcatcgataaatggtccgctcctcttctggggctttgtagttgctgatgcaggtgcggttgcttttgtagtcttcgattcgtctgattgctgtgtctcgttcactggagtatccggtgagtcgactttccgacgcttgactgccgtgtcgctctcattatatcgcttgtcatccgctttcaagaactctttatcttcaccccaaaagtcaggcgtggtcgatcgctctctttcactcgtcaccgctgcttgttcaatctttgccagtccctttttatcctctaaaaaaagcccaccagaaggatcatttcttgcactattcccccggattgttgaagcaccccggccgctgctcggtgagcgtgaagttgctgttacaaattgggtgatccgagcctggcgagaagtggcacccggcggcgtgtcggtcttctggaagaaactcaagatgctcgaattgcgctttacggaggattgtcttgtgccagaagatcccttggaaggcgtggcccctttcttcgcgtaagatccggccattgtggttcagcggagaggtgggagtccgttgcaccgtgtgcgagaatcgagttgtggcgagggtctaagaaagttcgcacttggcccaaagtagtttgatatcggatgaaacacaaaaagtatggtcaaatgtacaatatgtccataatatatgcaccgtcgccagagaaatgtatgtcaggtcaatcggatcgagaggcgcgaagaaactggatcgcgacacgaagtcacgtgctcattattacttgactcctagcggggactacattcgattttggtatgtttagagcattgtgatatagtcaaatggccaaaacaaattgctgttcattattgcaaaaaaaaaaaaaaaaaaagtctagcaaggtatcatgaacaacatagcctagatgccagcatgagctataggcgggtaatctccgacgacattgcttttgcggcgtatcaacaagattcatgagcggtagtccatggtccgtttggtatcttggacgcactcgagggtatgggagtttcgaatcattcgttgcatcaactcgtctccccggtcatcaatcggggccacatgaaaccccatacatttggccatatagtcattttcattgctggagaccaccaagtgggaacaacggtattgaagagcgcgatgcgtgatttgtcgtaaaattgaggctagagtcgtttagcgagccttgccagcctggttggcagcctctatatgatgacggtattagtattgatttctagtttccgcaactttcgtatatcctttaagaaaggaaataacatagactgagctcaagaactcagtcggggaagatgcgcaactcacctcgccgtgtggcatcctccaacaaccccacgtcaacctccgaccgaggcaacatcacgtaccgcaccacactgccgcggatgaacatgttcttcaccgaagacaggtgaggatacttggccagctccaacacttcgatatcatcgagcttgatgtttaggtattggtcgaccgatttcaggattccacgaatgcggatgtcatttttgagctcaattgtgaccgtctggttggtcagagtcttgaagaagctgtaatagcgagcccattagttcctgtccacacaaactgagtttgcgctccgcgtcatagcatacctgaagaaaagcatggttgcggtggataggaaagcttggaggggtgcttggatgaggataggcgcgctggatcaaagcggtgatttgtattctgccgatgtcggaaggtgctgtgagttggatgtaagagcttggataatgagtatcacgagatttagggacaggaatgtcgacggcgctcgagagttggcaaggtgagatgcaaaagagaagcaggctgacgggatcacgtgcacatccccatataagcggttccaactcaaccaacgctcggccatattccctcgagtttggatttctatcgactagaaactattggaggcttgttctaggtcattcagcacatatattcatgaaatatatctctgacttctaacaatgcttatgcacgtctacatccgcttacacgggtgaatcatgctttagccattccccattgaataagcgccgagtcctttgaactaaactccctggttatgtcttggataaagtaggctagctgagcctataaacacatgaacaggagtataaccccaccgatcgaatgcctatcgcttgatatcatcaatccgaaggaaaaacccccacatgatgaacggggacctcttatatgggtcaaagcgaccggtatcttttcttccgcctggcaggtcgttttatcgctgtaccagctcaagtctcgatgtttatgcatactggaggatccagaagccattccttctgttccattaggagttattcaggctttgcgatgaggctagttacgtcgagcatattgggattaacatcatgctctatgatggcatttggcatcaatttgcagctggataccaagaacttccgggtggatcagaaagaacgaatgccatctatgagacctgggaaaagggcatggcgacgcccaacatcaaaatctcgagcatcggcgttagattcttacgcactaccaatactcttatccctgatgcagatgtgcgcgtgattgatatcaatgggaaatcggcctcagtccgtaagggtattgtcttggttagtgatgtgttggaatactagggattctcgattcttggttggctgtagccacaaagtgtttaccactaatttcattagatgtacagcatgatttttccggtcccttcggttgtcttttggtcatttgtttcactcaaagttgcttctaggctgacgcaaccttctctacaacatccgcgggtaagcaaccccgaaagccgaggatcaacttggcttaggagggcgggttattcttcagcactgcagcactgtgcagattgtgccgttggtctgaaacatagttgttggaactactttgtacaatgtaaagtcactaataatcttggaggacgaaaccatcatcatgcattggctgcatgcgcataattctggcaaagtgtcagatatattgcaacgacataagacatgcggaactctaggcttgttctttcagtcgagattatcatttaataattgccattttacatggtgagttcccatggcgtgctgacttctgaacttctacaatatctagcgccaacttgtgaaagcatcccggtaagaggggaaagtgtacgacatcgattcatatcaacatgagaatgtatgtattgaactggacatctggactctacgcgcctttagggtcacatcgtccacattttaatgaggggcaaatgtgacaatgaggtcaattaacatataatttctatcttaagagaactatacttctctagcgtgcattagtatagtgaactagatgttaaattgttggacttggcgatcttttcccctcttttcgctctttttcctcctttttctcttctttttgcgatgatcactacctcatctcaccaaatctcccatcatatgacattaattaggacgatttcctgcctttttcggtgctggaaaggtgcataattgacgttccatccacctccgacgggattaattcgactaaagatagtagcccggcgcctacagtcagccaatcaccagcctcttcacactgcatatcactctcatccacctctcggcaggttcgtcacaccatctacgaacctcattcgtccattttcgcattttgaatctcatttactggactctggctcagaaaatggccttggctctttgctgacgggcgaaacccctgtccagcgcgacgcgcccatttcctctccaccaataagatcaatgtctgctaccctccagaccagggtgattggattaattgtgcccaaccttgcattagtctctgtaacggagtgactctttctgaagagtgatcggctgctcactgcacataccccgtggctggtggaaagcgcccaattgactataaacccgtcccaactgccacaatttctgtgaacgctagcgttcttcgtttcgtggacttcattctcttatgctcggtgcctatagctctggtagcttttgcatctgttttatttcttattgttatcttgctttttatctttcacttcacagacccgttgatcggtgtcgccatttcctacgagtcaagatacccatagatatttccgtgagcgagtcacgcaaaaccaacatccaacagtttgatcaggtgttcaacatgaccgatatactccgtatctcgactgtacgattcccgccccctcggcaggcccgaggaacggtgcttaatactataatggaggatacgcgcgaatccaatttcgctcaaaccagtcccaaaggctcgcccccgtccagacttacaccggcagctatcagcccgcagttgaagttgcagaccagcgggttttcggtaccaacacacgcccgccttgcccgcctaatgtcgcctctctccgccggcactacctcatcatgctcagatacagaatggcaggctcagatgcaagagttccgaggatacgacgacttttacgatgccacagatgatgatagtattgacgataatgaaaccgaaatgagcgattcatgcttttcccccgatacgcggccatcgagcttgattaccccaatcacccgcaattcggtgacctcaactgggagcagtcggaagcgctctctgacccttgagattccctcttctgcattgtggccgtcaattaccgggtccctcaagggctcgccagtcccgcccacccctccatccaagataccagtctcgccagcggcgctgtcgatgctcagtcgttctgtacctgcatcatatgccccgccttcgctcgatggtagcatgacctcggaccaagaatcaataatcagtgcattggctacaccggactctcaatctctgccagacaccaactgggatgcacatgatatccatgttcgccgagatctggacggaagcgaaagcgatctagacaatgcggactccagttcagacatccatactgtacccattgctatcgagacccagcatgaggactggcgtcatgttctgggaagtttcccccgaattcccactgctgcccaggcatattcacccccgctctcgccatcgtcctcgccttcttttcatctgaataatgagccaatttacgaatatgatgacttgtacgacgccccacagtctattgaccaaggcgcatttctgcctaactcggcactggcaatgctacaccacgttcacttagaagagacacccgattcgtgttctgagacctcggaggataaaggcgagatgtggcaacttcagccgcctcccagccgcccgagaagtgccgacggggtcactcccgcatctgagctgtctggttacagtttcagcgatttgagcattccatctcctggtggattctttgcttctttggcgccccgagcgcgccacacgtggtcaatccccaacaccaattaccaaccatcgtcggcggctgcagagggtttctacaaccttccttggcgtcgggatgatggagatattgttgagcaggtagttgaatggcatgagccccctgttgacgaaaacccagtcacagctgttcgtgatgaagaggccccgcttactgccattcgacttccctgtgacacacccactcgtcggtctatctaccaagatagccccatgagtgctgcatttgatgcagtccaggttcaggagatcccccgctctgggaacggatatgaatacgacgagtgttatgaccaagagctgcaggaacgtgcagttgcgagccacgaccggaccaatatctggttgtcagcccaagcatcttacctctccgctcttagtgagacaaatcccgcgaatgacgttgagcctgtagaatcacccaaggagtctgatagtattgaggttgaagccaaagacaccacagaagagtctaccactaagatggtgcgattcgtcgagggtgtccctgagtccctcagtcctctgcccccgatccttgctagcaaggattcaatttactggcgaggcttccagtctattcgggaacagtcaaccaagacagatgggttcatgcatcgcaacatgcgcttcgatgccgtccaatccatgcgcctcgccatgaacgaccttcacatcaactgcttgctgggcaagtatgaacttgttcgccccgagcgccctgcatacaagggtccattcgccaaggcacctcgcaactcgactattacctctgagctggctgagaaggccaaatttgacaaggtggagaaggagcagctggttcttgctcagctttcgcagcccatgtgggccatggatgctcttcggtctctcaacggcggcaatctgctcacaagtcctgcccagcgtatgcttgcacaaacctcatcaaagcccaaggcctcgcagggaccacgcaaacgcagcttccgcatcctagacctcggcggtcagtcctcctgtgactgggcctggcaagccgcgtacgaattcccaaatgtcaaagtttacaccgtcgcctccaagaaccagaccgtaaacagcgccatcaaaggccctcccaatcaccgccaggtgaacgtggataacctctgggagcttccctttggcaacaaccagtttgatgtcatctccgcccgatctttgcacgcactgctaaagaccgaatgtcccgcaggcaaggaccgcgacgagtacgacctagttctgaaggaatgcatgcgatgcctcaagccaggcggctacctcgaattccaagttcttgacgccgagatctcgcgagcggggccgtacgccagtgcaacatcagtggagtttgccttcaacctgcgcaaccgtgggtacgatccagtagcatcgaagagcttcgtcgcccgtctccgcaacagcgggttcgtcgacacgcagcgcgcgtggatggtcctcccgatgggtaccgaacacgtcgagcaggagccgatgcgcgagactccggcaccgcgtgtgcagagccaaattgaagattacgaggcagtgcagggcccgattggtagcacggcggatattgccagtattactggactgattggagggtggatgtgggagcagtggttactgaaattgcgagtggagatgggtcgcgagcgacctatgttgcttgagggtcttggtgcgctgtttgatgaggggaggaagagtggcgcgggctggacctgcctgtctggatggactatgaagccgaagcggaagagttctgtctctttggctgagactgggtctatctagggatatcgatctttatgtatttagctctggccctggtggctcgcaattaatgtaatcaatgctttatgtctatgatgttttacttcaataagatcgaacacaaggttccttccttcaccacctggctcccaaccatttccaccttccagggctagttatatcactctcggttcaacctcttcttttctttcactcacttctatttcatcttcagttgatctcttcctttgctctcaatcgacatgacccctgcgagaggggacctgcctgtgatctagactatatcaaatgcgctcatggtggccttctcgaggctttggatgccaaatcgattgccaccccagagtttgtggagtgcccgcctctcaaatatcgcccgggatgccggagacgtcggggatatgttgcccgatgagtttaaccaagaccgtgctacttgggaacgtattgtgaggtctttcggagacctcgggagttggatggccgatgctcgtcttcctgatgaattaatattccacgctatcatacctaattccatgcagtaggaggagttgatacacgatctcaaccggccacgaccggctgaaccagatgtacggcaaagacggagaggcaaagcgactgaaccaaccacggccggaccgggcaaggtcggatcctttaccttacgtttgcattagagcctacgcctcagtacctggagtttctgataaatggcctttctccatatccacttgcatgggcttcttaacatcttcgagagtgcagatatgcttctcttcgggtttttgatatctgcgatcactcaccaaatctccaaggaagtagtcccaggttatgacgcagacaaaaaaaaggagggtgtttatctcgaggaggagagtccgagagatcctgactttgtgttgtgagagataactttcgtgcacttccattcgtttcttctatgtcattaattttctacgtcggcgagagtcttccctcgcaaagttcccattttcccgttcaaagtactcttctattgtgccgtagtcaatgcaaagtcaaaaggcaataagtaatagcagactagcccgttttatgtcgggctcaggagtcagaactccctgaatcgcttgctggagagaacacgcttaacaccgctgttaattcgactcggaatgttgacgctgggactgtgcctggagcggacgttcgatgcaattcttcggtggctgttcttctatgcggtcaacatccggacaattcgctttgtgtcctgatgactctcccattttcccttcagacatcatcccagacactgaatgtttcccttacggagagaagaaagacaaggagagcagtcattgcctctatcatatctgtcgcagctgggtaccatgcatagggagacggacggggcggacgcataaacaagatagcggaagtctggctgcggtactgggtatgtctctacccaaccgaggtgatctctcataggggccaggaatactatgacaattcaagtttattgagatggtagcataaaacttctatactccggagcagtgtgccccgctacaagcactgataatggcccactttgctaagacgtatctccttgggtaacgaagcggctattctaacggctattgagatttaggtatctgtatggagtacccgatcttccagttagaatgatgagtcgtaagatcggcgaaggggagataagctataatgtgttgtatatagtcaactgagcactaagccaataaatactccgtagcaagacataaaatatagtgcaagcagagctaagtcgaaatccaaaccatatcaatccataaaagactgctaaggaataatcttataagcaaccggggagattcttcctgattggctcctgaactccgcagcttcgacgcagattctagttctatcaaggtcagcagacttgaagatctttctcccatcacctaaataggttatccaggatgcaaggatctcgaaatgctgatcctctatttcttggctgtaagaagtcaagattgtacacgtgagagtcagagccctcatcgcctgtactttgacagtatacagaaggggagacttcaaagaagaagatagaaagatagaaagagagaagaatacagcaaaagaagcccgagttgtagatttcgggattcacgctgaacccggctatatccactcttcgccactgatgtaaacacggggagcttcatatctttttttcttgataacccctccatccctctacccctccagactcctcgccccaattccttcctccaacccactcacgatacatacaacatcatggcgcctccagctatcatcgccccttcaatcctcagcgccaacttcgccaatctgggccatgactgctccaagaagatggaagagggcgccgactggctgcacgtcgatattatggacggtcacttcgtgccgaatatgaccatcggctgccctgtcgtatctcaaattcgcggctgcgtcgatcgtccttccgaaccctgcggtcgtggcactttcgattgccacatgatgatcatggaggtgagttatggacttccccatacccgcgtcattccggcacggcatgagctctccccgctgacggtcctttgcttcgttatagccgcataaatgggtcgtcgagtttaagaaggccggttgcgatctttactgcttccactatgaggcggctgtttcttccgtcgccgcgaccgatcctacggataaagaaactaccgctcggactagccccaagcaattgattcgctatatccacgagcagggtatgcaggctggtatcgctattaagcccgatacccccgtcgatgtgctgtgggatattgttgagagcgaggaccccgccgaacgaccagacgtgagtcattgccagattgcccattcttccacaccgcttcatttcaattgaatgggactaactccgtttcacagatggttctagtcatgaccgtgcaccccggtttcggaggccagaaattcatggcttcggagcttcccaaggtcgccgccctgcgcaaacgctaccccgatctgaacatcgaagtcgacggaggcctcggcctgggtacaattgaccaggctgccgatgcaggtgctaacgtcatcgttgccggctctgcggtcttcggcgcacaagatcccggcgaagtcatcgcgaagctgcgcgaggctgtccagaagcgtcgcggcgcggagctgtagagacggtacatagcacaaaaggggttaaggtgtctttgtctcatttgaggggtggtctctttaattttttatattatacattcttaatcacgagttatgaatggcatttacatgtgggagtcaactgtccacgctttcgaggttatttacattttcatactgcatgtacgaaaaaatcgattgtaccttaccaggcattcttgatgtacagatgtcataatcgtcgaattcgtgaacagcgactccctcgatcctggaccggtagttgcctactccgacttctgtgtgggagacagccctcccttggtatcatccttagactccgacttgatttcttgcggcataggcgtcgcaagcatttcagcaatagcattgcccttaggctcattgggttccatgagctcttccttattctcgacggccacatcatcaacaactggcacctccttaatcgatggggacttcgatttccccgccttttccgcagcctctttgcgcagagcatcaatattgcccgtcggctctgcagagatggactgcctaatatcatgcaccgtcttgtcttgctccgcgttgtcgagtgttggaatcctggacgagcgatggtgtccaaccaatccgagcatctctgcgttatctgcgtggaagtttgccgaggatacggccgcttgttcggggactagggtcggacgtctcgtggcctgtgatgattccggcgcggtgtcgggcaattcgggggccaccgagccgcggtgcgcgcgactggcgacaggtacccctgtagcttgtgctttcgcgtctttcttatcgtctgacttggtcttcgccttggcggcagcctccgagctagcttggcgcagggccagcacggtcatatcgtctttcttgtcttcatgcttggtaacgggagggttttggatcttgatcgtggagggtttgagggtagttggtgtcgactcggctttgggctcggtcgccgggagaggatagctggtgggtggcattccacctaggtcctggacgctgtttactaccatacgcaattctccgaattcgttccattcttcgatctcttcaagatcctacaagtcgctggggttagcggtgttcctggtatattggtacgacagaactgcgtgaaatcggcatctatgcaaggggctgtcacatactcccacaatatcgccgtatttcaccaatcctggaatcttcttgcccttggagcgtcggccccagagcttgcgggcagcgtcgtcggtggcgacatcaatggcgcggaaggggattttgttcgctttgaggattgtctcaattctggaggtcgctgtgataatgtgcgacgaccccgcggtcagggaagtgtagaggtagagggttgagtcggacatgttggagctgtggtgttgatggtgtaattaatgggtgttgaggatgagagatagggtcttatggaaggaatactgaattcattcaggggttagtcttgtctttcctcttggattgagcttctacaggagaaaaataatttatttaccccctaggggatttgttatgacgtggcttggtgggtatcacgtgcagatgaatgctctctcgatttcagagggttctccccctatatatgtctgtagctgtacttggtctatgatgtataccaatcccctcagtcgagtacatctctccacacgagccgttccacatgtccaactgctatctttccaggaccccagtgtggcaacttgacgtcagatccagagatccaagtatcctggaatattctggttggtttcacctgttcgggttcagtctggaacaccaggtctattccgtgaacagcaacctgacatctctcaagaacatgcgccagccatggctatagttacctgtcacatgtttatcaaacatcatcttcggggccaaggtctgagcatgatcagcatgcctacccactaactaagctatagactttatgaagagttgggtaagaagcaggttttagtaacgtcaacttaaaacgtctttaggcacttctcgcacttcgggcactttccctattattagcaattcgataccagttggttcacgaggtcatcaagtaatccaatcatgggagtgttattgataacggtttggactggtcttggcggaagtgccgaaatacaaagattctacacccgtatgggatgaataatcccttactacctgagagtacccaacaacagcccgatatatattgtattctgtgagtgtggtcacaagcacacgagacggatagtgcacacctataatagttcctcgtatccactcaaataagcaccaggtgtccctgtgttatagtaggctgcagaaatatatatccacggtcctttagaggaagagcctaagagcctcgaaggacgcgtcctacactggaggcgcagcgatatgcagaaagcacaccaatcatgctagtaggcaaagaaaatgaacctactgacacaaacttctcgcctgcttggaaaccaggccacggaacttgcatggaagctcgatctatgctttccccgagtcatgaaactgcagcccagctcaactcattcggcgtctgggatctattactattggagccggctcgctttcttctatcgcttgtcggcaaatcggccgagctgtcccatgtcacgcgatcgacatggggaagcaggctgcatctatacgtttaaatccagggagggcggactgtgggtgcgaagtatacgaattgaaaggcgttaacttggaggatatgggttctcaagccgttctatcacgaattaatactacgctcggggagtcaatatcattagtcaatatcatcagctgagacttaggcacgagcttacttattaaatcaatattccgtatagctctcccattccaatgcaatgcattagaatgacttgtcccgtgcacacgaccaggaatttacagcctatcatccaaggtggctgaaaggtggctcatcgatgggtttctagtcggacccgagacaacctctgactgcaggcatcagcttaaaagctagcattaatgcaggggcagacttatcagcgtctgggccatgtaacacccgcagagccacgagctttgacatggcgcaggtaatcacgcaagagccccgtaccctgtcaatccgttctccccgtagaatgacgaagtcggtcaaggatttgagttgacggtgagagcaaattcgtgtcgaatgtggggaggactcttagcttatcatgtatgtaggcgatagatgatcaaaccgaaattcgcccattcgacgggagtgatcccgcctgtctcgggataggaaaaatgatccatcgtcgaaatttacaatgttgtatgaagtacgaaatactacggtgaagaatttcctgttaggtgcaagaatgtctagccggcgatcctcattgactaccccatacagattgctccgtggccatgttgtgttcactctaagagctatcctgaaacagatcgacgtgatcgcggagggaggtacggagtccattttcgatgagcccgagattgccgctctataatgtaaggaatctattgccggcacaacatagtcgccaacgctcaacatcatagcggatcaataaatgtccaaccattatccgatcaggagaccgatccacctcagaccgtggagcctctgtactagtcaccactaacctcgtgtatcccgaatagtctcgatacggcgtatcggaggggtcaatcgatagcgtgtagacaggcatgaaagagaccataattgggaacatcgactacaacatatgagaacaccctgttgtatatttgataggggccatccctgacaagcataaacatgaaccgtgggactgcggcgggaaccttgcaacgacccacggtaacacggtaacacgtgaatcgaaccgttcgacactctatttcctcggctatgttgtacttcctcattaatcacgctattatcctttgctagtcatctcgatcggacattgggcgctgacctagggagccaaacagcgtcatctgcaggatgccccagctgccacgccagacgacgtggcagttcttggtccgaccgtagcaaatggatcctagggggttgtttcggagtatggcggtgctggaccggaaaacggaggggttttgtagtttctttcatgctcccgctgtaggcgcttgctacttgaggggccagtgacttggttatatgtatggtgtcatgtaccccggtttacatgtatcaggtcaccttttcgtaagcaaggacgcatctgctggctcggaccactctcggggtgatccggttcgctgcctcacttttagttccttttcgttctcggccgtctgcagcttcgcacccagcaggatctcgcttctagcaggtgtcggccctcttacccgggtgcatgcctctgggacatgggcttgctgatgacctcgccacggataaactttgcggccatgatattttattaaaaaagcagaaaattaccggaaagagaaatacatgactacccgaacatctcagggtccagacccgatcaccggcttccacgtttctgggagcacggagtatagtacggagtagtctctgcttgccaattctcgtatctctctttgtggggagtgtccttcatcgtcgatcagaacttttgtcttcttttatctactcgtcggcccaatctgcatttgcttcttctcccaacttgccatattgtctaattgtttttatccttcactatacagcagaccgtggtacattcatcgcaacgcagatcttcgacgattgcattgataagctcagctttccacccgcgcagcttcgacttaattttttttattactattgcgcttcagttctacgtacgcatttcttacctattctctcgcgcaaagcatgcgctaactattcgcagaatacaacccacccttctccatccattttattgctgatagacagttacttcccggccattgcgaggaacccattgcgccatgactgtcaatctggatgacgaactgttcaccagtgccatctccggataccacgaggcgtttttggtccaacactcccacctcccggaagatgaacgaaatcagctctggattgaacggctgagtcagttcatcccgaccaacgaccgggattccaactggcagccagctgggagcctggggaaacggaatcgacaggatgcgacaccacggacgttgccatgttgtgatttgggtcttcctcaggcaaaacggagagccaccgtatgtgtgaccttggttacttgctccagccttctcctcgcgctcgcgtctcctcacttcaaccgccattcgtccttggattgacaattggcagaccccggatctctcagtcgattgcccacgcgacctctcctacgcctgccccgcagacccacctcggaacggcgctgccttcgcgggacaagactcctaccgacacacgccgatggtgcgctcccagagccagcaaataccggtctcccaccagcaccaccccaccggtgccgccataggtaaacgtcaatccttcggcctggtacggacccatcgcctcgaccatgtcgacgaattttcgccatccgatttcgcaaagtatttggacgttcctcccagtcaaccctgtgactcggcgttgactttcggactcgcaaatcatggacaacccggacctttccctcaataccctgaccggacgcccccctggaccgaccaggccccagcagctgcgccggagatgtcccgcagcacgaccgccgactccttagttggtggaatcaacatgatccgcttcgactcgaccggaccagctcagtatcaagaaccgaccgactccgtcccgccggactgggtgcctcctacctccggcctgccgtatcaagactcctttctctcccccgtgtaccctgacctagatcccacatcgtcttccccattctcccattctcccttctctcacccatcgtccttctccaacctaccattctcggcatctgctcccccagccgcctcctctcgctacccaatgccccacaatcgcctcctcttcgactgcatcgacggccataccctggcctcacagcgctcccgggctgtgcgacgcaccaaagagcaaatcgcccaagccacgcgccgcattgctccaaaggtcgagtctgtcgccagcagcatgtcccagatcgataaccacaagatggtccgcatctcctcagcagacggcacaacaaaggaagtcgccgctatccccaaggcctccgtgcgacgaccgccacgaccaaagacatactgccgcatctgcacggaccatccggacgggttccacggcgagcacgagctgcgccgccatatcgagcgcgtgcacgcttccgtccgcacggtctgggtctgccgtgatatctcgcctggcaagtacttccttgcaaattgcaaggcttgtcgcaatgggaagcgctacggtgccaattacaacgcggctgcacatttgcgccgcacgcatttcaatccctgtgagcggggccgcgggggccgcgggaaagatagcgagaagcgcggcgggaagggcggaggtaatcagcccggcatggatgttttgaaacattggatggttgccgcagaggaagtcaccgaggcggctggcgatggcaccaactcgaagcttctgattcggaatcccacgcatctttcgactagggaccctgggtatcaacttgctgttgctgcttgtggcctggttgagggtcagcctccttatgttgtggagtccgctccgctgaaggagtctgaccaattccccgagtttcccgatgttccgtttgagttcgattttgagatggatcttgatctcgacctcgacatcgatgagtcggaagattcctcattatccggttcgcaggcatcctgcacgcctgatactgattcatatctcaagtgagcaatcgtagtctgcttcattttgccactgggtttttttacgacagtttgtccaaagcactgtatgatcgagttcgtgtactgtactttgggctgtggttaatggtctctgggatttaggggttcgatcttttggctttatatcttgtttctttggcgactttgtatatcgtgtgatactggcattggcattcggtggagcgttcggtggagaccaattctcacagggcgtactgacagtaagaaggtgatctttgataatcaatggcacttgcaggtacaccgttgcaattgtattcagccctgtacttgtagcaggtacaagcatcagagtgttgcgtggtatgaggatgcaggtaccgggtactgcccaggcagcaacaataccggcggtgagtgccaagagtcagacacggactgtgagtggctgaccatcgccgggagtggagtccggtgtgacccggtggccgatcctcagccaatggaatgccgcccaagggatgcaattcgtggctgacggcctttgttggcgatagggctggcagaactgtggctggtagaacttaggtgatactgtggcctaagggccgatgggtatgtctgaggtactgcgatgttagtaatccgattgttgctagttggaaatagaagtattcgcctgcaaatgtctcaagcaccgagatagaagcaaaaaaaggccaagaatcaatatttactagcaaatcggcccgtgtggagaagcaggggaaaggaggagagacaaaaaggtacttcaaaggtacctcagccctggagtcttggcggccaaatgcccctatcgggcgcaccggtcaggtacctctcaagtaccccgacaatttccttcttacctgcaatacaacctcgagaaagtaagttgcctttttctcctttctgacactcttaatctcacatcttcgcatcttcaccttcatctctttccacctcttcaatcgcttattttggctcatcacagcctccccctttcgaccaatctctgtcttcgccttatcccaggtacgtggatttagctgctgtggtagccattcatgcaccgtgaccctggtctcatcaaaggcgccgcaaattttgatgttgtataatgttgattgtgatcagtcgctgattcgttctacctcgattttagaagattacctcccgctgccatgtcttatgcgcagcagcagcctccgtatgggtaccagcctggcgctccgcaaggatatggaccccctccgcctggccctcagccggggtaagtcagcacctatcagcccagaactcgattttcgccgtcttgccaggaccaaccattggcgataccgaaaccgagaccgatcggcttctgtacgctttgcgaccgcaaaacttgtcgcctggtctgcggcgagctcatgtcttggtcaatactttggacatggtgctgatcaacttgcaaatgcagatactaccagcagcctggatatgaccagcaaggccagtacccgcaaggccagtaccctcagtacgcccaaggccagcctggtggagtaagtgttgacaattaaccacccaagccacacacacttaccgataaacagatgcaatacccaaaccaagctcctcctccacctcaacagcctcaagaacaaaaatctgaccggggatgtctcatgggttggtaagtaaccatattgtcggtgaaggtgggaacaacactaatctgagctcttttctttcagtctggccgcgatgtgctgttgcttggccctcgacgattgctgcgaatgctgcgacgagtgctgctaaactctatgacccatgacatcgacgatacctttcttcttgcaggcgttgggatttttcgatatgcccacaacattccaggacagaacactgcgctttctgaataccaataatctcctttgtgtctgttgcattgggctttcattgctctgggagaaatactccagtccggtcaattctagctttaagtattcgttcattgcgttcaagagtttatttgagatcttacaacatacataattatccgttgctcagatacatgcgcgtatgcattgaaatgcactcaagatatccattatcacattggatatatccaaatattgttacaccatatgccgacgatcgtctaatgcttaatctctgtttttgtgctcaaactggcgatcttgaactttcaatagtctcaaagtatccattcctgtcaagctgaatgcttgacaaatcttgtgtctgttggaactggcgatcacgcataagtccccacgaatgacaatttgctcaagtttctttcaaagacattggtcagaatggcgactaaaccccaagctacccagcgtagcttcatggcccgataaagcaatgaggtaaagggaaaacgttaccaagcatcgaaccgaaagaatcgccatctggcaaaacacagattgccttgaagctacgtatcaaacaggagagatctatctagattgtgctattttttggctttctgcggtggatatggagtctccaacagacataccagacggtggccgatcagcttgcaatcggccttcgcgataggatgtaaagagccgtctcagagatccctgagcaggccaaccgctggacgatggctgttaattcttgataatgccgataatattgatatgtggattgaaagcaagaattcaacaactggagggttcaaaaattacctccccaggagtgaccaaggcgtcatcgtcttcactacagagtactcgaagcaacaaagtagctcaacatcttacccaacaacgtcattcgaattcccgaaatggacgagcaaagagctactcatgtattgcgcaactccttgattgacaaggaattcctttacgatactgaaaatagcccagagcttctcgagcaattgacttgtgtccctttggctagtgtgcaagcagcttcatttatcaacgagaacagcatgacaatcgctagctatgttaagcttttagtcggacaagagcagagtgccatcgatcttctgagccaggactttgaggtcgatgcaaaagcattcgaaaccctgtcgtgaccacatgggtcacataatttgagcgaattcgacgacaaaatcctcccgctgccgactatctctctctgctttctggcctgtatccaaagagaaggatattccgatattgtcccttccgccggcgtccaatgtcgaacagaaaaaggtgatcggtgttctcagctccttttgctttgtacgtgccacgcatgaagattcttgccttgatatgcatcgcttagttcatcttgcaagaaactggctgcaatcagtagacatcctccgaaagtcaattggatggtttacgtgggctagatgcctggttcccctttactgatgtggcagattatgagccagtggtgagtatgtgtccctcatgcactccaggtccttgatctaacggtaggagaggacccatcttccgaggatgcgtttttttgttcaagttagccagatgtcaaatgactgatcgaagatacaaagaagctagaaaacttctcaccggggatgtcaaaatttcagagagaatttttgggcccgaaagcgcatggactatttaggatcttgattgggtggcgattggctgttcatggcaagggtagccggagaaggcaatcaaaataagcgaggactggaaaaaccgcagaagagacttcaatagcatccaagctgtccgggctctgcaccggtatcggctatgtacacgcttttgaacaccacaagtctgcagagctttgcaggaatgttatcccacatcatatcaaagcatttagtgtgggctcatttgagacgactgatgctataggttgcctgttcatggattgctggtcccatggatactcttggatgtgtcagagctagccattctagtactgcatatctacagaaaggtcatcggatcggccaatcccagaacggtgatggtcatggtaacaatggcaagtatatatacggacggatggcagcataaaggggccggatcattgctaaccgaggcccttgagatccaaattccattattggatgtgagtatccctcaattctccagacaatggcgtacggatcaactacatggttgtttacgcaaagatgcagttgccccgagaaaaggtacgtccggtttagcgcgcaacgctatggcttagatcacggagttactcggctcaatacgtatctgtggagcagtggatgacgaagtcgaagcaagtttctcgttgctgtactccgctgatacatgcactaaaattgtggtacaagagcattcaattccttcatgggcagatgtttttctcgtgtttaggcgaatatgataatagaccgaagaagcccttacccgaaagtcaaggtgtatggcctctattatgcgtggcagccaagaaatgatctcctcctgcgtgaaatccaaaaagccataaaggatatgcccgcaaacgggcagatcccgagtggagaactcagatcatcagttgaaggtcagcaagttaaggaatcctacgacagcatgatctcgacaagtctcccaatcatctttaagggcacaagaacttagggtcttctttgtatgactgtcatacattttcactgctctcaagtgaacctcatcctgtaatagttgaagatacgaatgtaaataggaagtaaaatatatatttcgtggtatataaagaagtcttcaggcgagttgcttttatatcttcggagtcgccgctgctctcgagccttgccggtcacataaatccttgtcagccactgggcagcaagagccaattatgtaattcaattaagtaaccttccagctggaaccagaagaccaaaatagtcggccgaacttgcgccgtttctctttgggaataacacaatccatttagctcgacagcagtctttttacttgtccttttgctatatatcgtctcccctttctcacgttttctatgcgtaacctttgaaatttcgctatgaccgcgttctccacccgcgagccgtcggacggtcaataagtagttagcctgtgatccgaaattgtttcctaaacgagggctgcgccgagcgctttgctatattcggttgccacaccccgaaccaatcttgatttgcacgactctcgactctgattcatggagattttccgagtttataaggggtaatgggcccgtggaccaatcagcggcagggaccgttggatgtgccgaccactttcattatcaatctcccaaccaagcgagacaaatgaggcaattccatgattcatgaccggaagacgagggagtatccacagttaatatggattcttgcagccaagaggccaagcgaagcttgagaccgacgctgcaaagcttattgtggtcgacgcttacccgctcgggcctagcgctcgctagataagatgagggcgacatctgattagatctgccctgtttcgctgtgatttgccggtggggcaagccctaggctagcagccctggaatgcgctgatgagtggatataattaatttcaccaaatcaccgctagaggccaaaggccgattttgctatgcgggtcacgacaccgcgtgtttttttcactgtctcggtgtcccatccgaactgtgccgatctcgggactttgtatactataagtgcaacgggcgccccattatttccaatcttgtactgaacgcttgtttaattttacctcttcaatatgggcgtccgtcttttgatccgaagggcccgaacggtcttcagccgtatggcggcctctgacgctgcaagctcaaccgacatacctcccccagcggatggaatccaaccaagcaagatagatcctgccaccgacacagaacttcaacaggcggatatgccgggggaagacctccaacatggtgtccgcgatattgaggccatcaccttgacctggtccaagacaaccttggctctggtttttatcaagtaagccgtttccctagacaatagttaagcttgaacagttgctaaagcagtcgattatagtatctggttcctatattttgtcaacgccttccaatcttcagtcttctccagcttgagcccttacgtgtccagttccttctcggctcactcactgtctggtgtgcctgttgcgcttgccgatgcttttgcggcagcaagttatatccccgtcggaaagatgatggatacctggggccgtgcagaggggtttttgctgatgacatgtttcgctacactgggattgattctcttggcctcttgcaacagttttgccatctactgtactggatatgtaagactgccatttattctgagatactcctcagaacgaacctcctttgcacatacttacggtcgagtactaggtcttttacaatctcggattcagcggcatggaatactccattgatgtggtgaccgccgatgcctcccaactgaagaaccgaggcctcgcgtatgccttcacttcttcaccatacattattactgcatttgccggagcaaaggtagcagatgagttctactaccaggtcagctggcgatggggcctgggttgttgggctatcatcttccccattgtggcggcgcctttgtacttcatcctcaagaccactctccgcaaagcggaaagggaaggtcatcggatcaaggaaaaaagtggtcgcacatttttgcaaggtgtctggtattggactatgcagtttgattgtgagtattacctttctctatcatttcggtgcacatatcccgccggtcggacattatcgacaagacttcccaatttcaaccatttacttcttcaaacagacactaatctcgaacagtgcctggtgttttcatgtttactggtggactagtcatcttcgaacttcctttcgatatcgcaagtgaagcacccaatggctggggctcggattatatcatcgccatgcttgctgtcgggttctcgatgctctttttcttcgccatctacgaaaattggatagctcccgtgcctttgctcaacattaccttcctcaccgaccgaaccgttgtcggtgcctgtcttctggatgccacctatcagctatccttctactgctggaacaactacttcacctccttcctccaggtggtcaacggcctaacgattgccgaggctggatacgtgaataacacattcgatgtcgtgtccggtgtcttactcttcttcgtcggctgggctatccgaaagaccggtcggttcaagtggttgttatacatctctgttcccctttacatctttgctcagggattgatgatctatttccgtaagcctggtatgcgcgtcggataccaggttatgtgccagattttcatttcgatcggcggttcgatctttattatcgtcgagcagatttctattttggctgccgtagatcatcaacacgtcgctgctgcattggctttgttgaacgttgttggtactatcggcgactccgccggttacactatttgcacagctatctggactaataccttccccggcgctcttgcgagatacctcccagcgtctgaattgtcaaacttggacaacatttacgaagacatcacagtgcagactagctatcccatggggagcgaggtcagactggctatccaggccgcttacggctattccgaagtcattatgctttcggttggtgtgggtatcatgggtctggccatcatttggaccatgttgatcaaaaacctcaatctcaaggagatcgcccaggtcaagggtactgtcttctaaggatcctttgagatagcaatggtgtccggttggatatctggctgtgcgcatcatactgttcccttcttccatgatccccgggaggatacactcgcagcagcaatcactcattatcgctaattccctgatgtttcttgttttccgtttgttgtctttttcgtctgccgatgtctactcccgatccggggggaaagcatggccatattgtccacgatttactgaatcagatgttcacccataacttgaagtgggacagctggaattgatctttcaggcggccatttcaggatagagaaagatcaggtctgatcatgattacctttcaatgtacaaataggttgataccacatccatatataccaatgtcatggaagaccagttgtttatccaagcgagattattatttgcaagagctttacatgtacaattaatactacaggaatagggtctatcaccgatatttctgaattcaatcagattataaatctttcatacttggtgtagctaactaccactctaccaccattacgtataacaagcggctattctaatcctaattctcaacactccaaccccctttttattcgcgaattattagctaaatgtaaagctgcatagaaattttctgcaagacacaatggaaacatccaggagcaggcaaaaaaccgggggaaaggcacagtccggggaagaatggaggatctgcggagaaaggctggatttacccgtcaatcacaactcacatcctcagtcatggccgtgaccaactacccctcaactgcagccaaggtagacgcgtctcttgtgcggtgctcgctctcgaatcaacacgaagagccggaaattacttgcaggaataagcctcggcacctttcctgccaagatgctgcagcggtattgcatcgcccacgcaaggaacacaccattacgacacacgttggccttactcgcaccaaacctcccctaggcggtgtatacatattgcatctgtcttgatccatgcacccccgtggagatttacctcattgggaatgaagtgtcggtattgcggtcgattcggcagattgttttgtgcaaaggaagagatccagtcatggccctcgaacccctcatggagatttacttcattgggaacaaaacctcggtcttacagtaggtgtcggcagatgttctgcccaaaggaagacataatgttatgacccttaggtgtcacctcgatccatccgggtcaattggagtacaatgaggagcgcaggtaattatccggcagggcactcctcgctgggagattgagcttcctccatataaatatccgttacagcgcgcattttactcagactccctgaatttcaaatagcattggctaattgggactaaacacgaaaaatgctgcacaaatatcttcttctgccgcttttggcgtcatatggtgccgcggtcactatttctgtagcaaaatctggaggcaatgctacatcaggtctgcaatatggtgcaatggaagaggtaggttgagcttcgtgtcaattgttatcggatctaattcaaggtttaggaaatcaaccattgtggcgaaggaggtctctatgctgaattgatccgaaacagagcattccaaggaagtccaaagttcccttcatcattggacgcctggtctggtgttggggactcatcgctgtccctaaagaacctcactgacccactgtctactgcccttccaacttcaatcaatgtcaagggtactggcacaactgggttgactaatgcgggtttctggggaattgacgtccgtcctcagaagtatactgggtcattctatgtgaaaggctcttactcgggctccttcacggcttctctcctctcgtccagcggcgaagttttggccactactaagattgcttcaaagagtgttgcagatgactgggtgcagcatgattttgttcttactcccaaagcaaaggcttccgataccaagaatacgttctccctgaccttcgatggctcggtaagatttgggataggggacttgctatgcacctcggctaattccatctagagcgcatcgaatggctcacttgattttaatctgatcagcttattcccacccacatggaatgatcgccccaatggcatgcggaaagacttgatgcaagccatggccgatatgggccccgtaagtcaaaatcttactattgccttggaaaagcccaatgatccgggatgctaataatcttgatagaaattcctccgcttccctggtggaaataacctcgagggtgacagcatcgacggacgctggaagtggaacgaaaccattggaccactcacagaccgacctggtcgcgcaaccacttggcaataccaagagacccttggattaggcttggttgagtatatggagtggtgcgacgatcttggaatggagcctagtaagtacattattttgccatattttgcctacatagctgacaaaatatgtctagtcctggcggtttgggctggactcgctctgaacggagaagttgtccccgaggcagatctcgatttctatgtgcaagatgccctcaatgagatcgagttcttgactggctctgttgataccgagtacggcgctctgcgtgccaaggttggacacccagaaccctggacaattcggtatgtcgaggttggaaatgaggatatgctgagtagtggtctggcatcgtacgagtcctacaggttctcggccttctacgaggctattacggccaagtaccccgatatccaggtccttgcatctactatagatatcacgattcctggaaatgcaggtggtgattaccatttgtatgatgtcccggataacttcgtcagcaagttccacatgttcgatagttatacatccgagcatcctattttgcttggtaagtcaataagtatacctgcgagatatgaactaacacacatcaaggtgagattgctgttactgagtcaaataacggagttggcattgactggagcaacactcatttcggtctgtacccttggtggatcggctccattgccgaggctgtgttccttcttggtgctgagcgcaacgcagacgcgattattggaactacctatgtgagttgtgtcaacttaagttttagtagaagagaactgacaaagcaataggctcccttcttgatgaacttggacagctaccaatggtccccgaccatcctctcgttcaactccgatcccgaccagacagctcgctccactagttggcacctgtacaccgtatgttaaactcttatcaggccttcaaagtaacatccactgacatgagatgcgaaaatagctgttcaaccacaacctcatgacaaacaccctcccatccacttcctccgacgacttcggtcctctgtactatgcaacaggtctgaacagcaagaccaactcgcacatcttcaaggcagcagtatacaacagcacatccgatgtgcctgtatcactgaccttcgagggtgtcggccgtggaaccaaggcagacttgaccatcttgactgcgccagatccattttcggtgaacgaggtgggcgggacgaatatcgtcaacagcaagactacccagattaaggctggcaagaagggcgagttctcattcaagctaccgaatctgagtattgctgtgctcactaccagttaatgtatcgtcaatattctaggatgtttgcgtatgcagagcatgactcaaatatattgccttccggtttccgggcttaacggattactgtatatggagtagattttcgtcagactgaaagactcagccttgatattcgtattctaaaatagccattttctatattctaagctatatccttccaacatctaccacctgtctgtcacattgagtaccggcactctgggctatgcaatcaccatgatctatttccgccagttaccacctctatgtatttcttcggggagtccctttcccgacccatgcgagttcggggccgcgtatcaatcgatcaatcgtgtctgcgcgaggcgtgtgttgacctcaccatgaacaccacgcctattccctatactcccttgcggggctcattcgggtgcgggtgcatgttcgttacttgccgcccgcacgctccagaccctttccgcgagtgaagattgcagcgacggtcgcgatgaatgcaaagatcgcggaggccatgaaggagagtctgattccgcggtagtacaccagccgagcggctaattgcacatccgggggaagatcataaatagccgagactgagtggcggatctcatcgatcacctaggagggagcgagtatattggtcagcaaggcttattcagcggctcgttatcatcaaacggcgaaggaattgtactttccatttgtctggtattccactcaaggcctcaccgaggcctgagttaagtgtattctgcatgatggtggaggtcactgcgacgccccaaacattcccgagggagcggatgaggtagacggttgaggcggagacggcgtgatctagatacgatattgttagcaggcttgcttggcaaatagctcggtcgctcgctgatccgggtaatgggctagcgacaaggatagggaaagtgccttaccggcgtgatcaaaggctgctaggaatgtgaacaggatccctgggtacaccatcccctgacccaggttggcgggaatcacatagacgagatacttccatcccgagtcgttgaatcggaggagcatgacgagcacattgccgaagagcattagggctgcgccgacgcgtacaatggaggataatctgccccagcgcgacatgatgattcccgctataagaccacccagtggggtgaatagacagggaatcaccagtcgggtgccagccttgctgggtgagtcaagaaggatcacctggaacatgagagggagagtaaatagatactgaatgattcgcgttagttacgatgctcataatagtggagcgggtgagcttactgcatatgctgccatcccgacacaaacgttggcaatctgtgtggatacagcgagctgtcctcgtagcatcttcaatggaatcagaggtgcagcggtggttttcgcttcaacagcgacaaatgcagccagcaataccacgctagagaccaatggcagaattacccacaggtgagtccaaggaagaatgttaccacccaggctgagcccgaccagctgaaccgatagagccagaatgagcagacaagcgcccagaacatcgatttggtgccaaattcctcgggttcgaccgggggaggattcagtgtggcgtgttgggaactttagaactacatagcccatgaccaatgcgaacaaagagactgggacctgcagcaggaagcaccagcgccatccgatcgagtcaacgatggcacctccaaaagaagccccacagatagctccgaagccgtacgagacgttctggattgcctggtacatgccgcgttggcggaagggaatgatatcggagttgatgattgttgctaggatgcttgttagtgagtgatatgtcaattgaaagatcatcgacttacccatagtcatcaatcctccgcctccaatgcccgtcaaggcgcgcatgatgtttagaaagattacatcgtgggccacagcacatcccagacaaccagccatgaaggtgatggttgcagtgaagaaacaagaccggcgaccgagtatatcggagaatcggccataaagaggctggaatgcggtgcttgtgatcaagtacgaggtagttagccacgaagcagtgttcgcggcgttgaactcggagctgataacagcataggttgaggcagtgatggtgccgtcaaatccgccaagaaacacattggccatgattgctgttgattgttagattctgcttgatcgtgtatatattttggtcgaacttaccgatttggatcagtagaaaccctggtggtgggctccaagttgcaggaactggatccgatcgcaataaaggttgctcttcgctttcttgtgctgacgatctttcgacttcattctcgtgcggcatcacgccggccgaagcactttcattcggattcaatgccattgtcgatttcaaaattcagaccacagatttgcgattcagaagatgacgaaggacgaaagaagggcctggccgaatatcggaaacttcagagatttcagacgcgcttgatcgggaaatgcgagcggattatcttctatcttccccgccaagtgccaagcacgacatcgtattccactgtgacatgatcaccaactattttaacgagatctgatggatgtgggcgattttttcttctcttctctctctacacaactattcaaaccaaagaagtcaaagtgactcagtgcagagtacccatctaaggttaatgtaccctatcatgcacgaaatgaccagaatcatggaaactgattgctggaccagtacttatcatgaagctccttgaagccgttgcctacactgcagtgctgttgccgctggccgcagcagactggcagttcaaatctcgaaccgacctggccccgcctcgtctgaacatcaccatcccggcgacaaaggatgtcgagaagggttacctcttcatcgcacctttcccgggccagtgggctgagccgcagtttcatggtccgcggcaggaagctccgtatattgttcgtgatgatggtgagctcgtctggtcgggttatacctacttctccatctgggccgccaacttccagaaggccagatggaatggtcaggatgtgctgttcagctttgagggcgatcataacccggcctatggacatgggcatggtcatgctaccattttgaatcagcgctatgagactattcgagagctccgcgctggtaatcacaagcttatggataagcatgaattccatgttgttgatgagaaaactgcgttgcttcaggtctatcagcctgtgccgagagatctgtctcgctggggtgctagtgccgagcagcagtggattgttgatgccatcttccaaggtatgtttgtttcagaatatatgaagagttgttgctaattcgcagtagagttggaccttaacactggagaactgctatttgagtggtctagcctcgagcatgtttcccccgatggtaagtcaattacctctaacccttatggtggactggtctgacatcgtacagaggcggtcctccctctcaacccgggacaagcgggtgcaggctataactcatcggacgcatgggactacttccacatcaactctgtggacaaggatatcgaaggaaattacctgatttctgcgcgggatgcttgcgcagtccataagattaacggtaccaccggtgagatcatctggcggctgggtggcctacgctcagactttgagctcggtcccaacgtcaaattctgcttccagcatcatgcgcgctttgtcgagcagggtgatgatgaggaggtcatctcgctgtttgataactccgctcatggaacagagaatcatcgtggcaaagaggtccacacccatcctttctcgcagggcaaggttatttctgtcaacactgccacctggactgcgaagattgttcaagccttccaacctcccgatgggctcctcgccaagtcccaaggtagcactcagcttctgcccaacggcaatgccctagtcaattggggctctgagggagctatgaccgaattccgggcggacggtactccgatctttcacgcttacatggactcaggactgctgggcgagggtgtccagaactaccgggcattccggtacaactggaccggtctgcccacagaagagccggccatcgtggctgagaagacctcctccggcatcgaaattttcgtttcatggaatggtgacactgagacggcggtttggcgattctacgccgtcacggatggatttggttcccgggagttcttgggcgaggctacacgtgatggatttgagacttccttctcgcttcctggtcactcataccaacgcttggcggctgaggctgtctcggctcgtggtcgtgtcttgactaccactcgtgctactcgtgtccaggacgcggtgctcccctacggtagtgttattgcggggtccgaggaccgcgactcctggagagagttgattttgcaggcatagatgaagacaggtctgtgtactaggctctatagggagttgaatgaggtgcggtgaggagcatagagtagtttggagcagtgtcacatgatcttatcatctttttacccttgagctttttgttctgtgtaattcattagactttggtatcgcagtatagcgaccactgcgagtggtattgtagctgaaaataagatattcatgtcggaatgcatctacaatggcgaaagggtatcgtctatggtatagtctatcaggtatatactacatactctcggatgctcacaactccgagccaaactcgtatattggccgaatccgagatccattaaccgaaaagggaagttgctatgaaccgtggaatataaggcgtgagggtgaggggtccaatgctactacgcagccaatcaggaggcgggaaaacaccttaatatggaggttatgtgtatatactatcgagaattaatgccatgtgacatccaaatagagattcagagatgggaatattcccttattcagctggcatggagatgttcatgcagtgtagtacatgaatcctccgtttccctccatttccggaaagagctgagacggtccatccatggatgttgcggcttttccctctttcctcttgaggattctcgggtctgtcactttccggctgccgtcgttctttccttctgtctcttgtcatcttccttcggtccttcgttccttcttctcttcttccttcctcctgccatcctttctatcaacactcatctgtcgcgtctcacattttgtttttctcttctgtcaacaactctcgtttaccttcttgaccgtgtcccttcatggcttcacgtcttcttccatctttgggcttttcgccgactctgctcatgccagacccgatggaaaacgtgtcggacaatggtgccgttgatacccccggggtgaagaccccagtgtctgagctctgtgatgatgatcgcgacgggcaaataaccactcttgcacgttctctttcacagatctcgcgacagggcagtggcaaggccagtgaaacctcagagggtgtcaacactttcctcgaccctacccatgatccagagctcgatcccaatggtgaccagttcaaatcgcgtaaatgggtgaagaacttcatccagatgacctctcacgacccagatcggtacccgcgtcgcacagcaggggtctccttccgcaacctcaatgttttcggctatggaaccgcggctgattaccagatgaacttcgccaatttctggctcaaaggcacaggatggtttcgcagtatccttggcctccagaagaaagtacgcattgagatcctgcgagacttcgaaggcatcgttcacagtggtgagatgctggttgtactaggtcgcccgggaaggtatatgaatcgacgctccccgcgaaaaactaattactaacggccaaaagcggatgctctaccttcctaaagacgattgccggagagacacatggcctctatctcgataaagagaaagggtccgaggtacagtatgaaggaatgtcctgggatcatatgcacagccgtttccgcggcgaggtcatctaccaagccgaaaacgaagttcatttccctcagctgacagtcggtgatacattgctgtttgccgcttacgctcgagcgccgaggaaccgactgcccggtgttacacgcgaccagtatgcgatacatatgcgagatgtggtaatggcaatgcttggcttgacccataccatgaacaccaaggtgggtaatgagttcattcgaggtgtttccggtggggaaagaaagcgggtcagcattgccgaaaccactctatgtcgctgccctttacagtgttgggacaacagcactcgtggacttgacagctcgacggccctggaatttgttaagaacatccgcctctccactgactataccggatccaccgcattagttgcagtatatcaagcgagtcaatctatctacgacctctttgacaaagcgattgtgctctatgaaggccgtcagatctatttcggcagtgcgcccgatgcccgacgcttctttaccgagatgggattccattgcccagaaagacaaaccactgcggactttctcacttccctagccagcccttcggaacgcctgattcgcccagggtttgaagactccgttccacgtacacccgatgagtttgcagcacgctggaaggacagcccagagcgtaagcagctgcttgctgagattgaagcaaacgcagccgaaaacaccgctagagaaacaaaggttgagcaattcagtcgctctcgtgcagcagacaaatctaggtttactcgtgcagcctccccatacaccctgtcgtatccgatgcaaatccgcctctgtctctggcgagggttcttgcggcttaaggcagacatggctatgacgctcgcgactctcattggaaataccagcgcatctctgatcattgctagtcttttcttcaacctagcgctcaataccgacagcttctacaagcgtgcagcattacttttctttgccatcatgattagtgccttctctagctcactcgaaatcttgatcatgtggcagcagcggccgatcgtggaaaaacattacaagtacgcagcataccatccctcggcggaagctatcagcgcgtggcttgtggaaatcccatcaaagcttttactggcagttgtattcaatttgatcatctatttcatccctcatctccggcgaactgcacctcatttcttcatcttcttccttttttcagcaatgacgacgcttgtgatgtccaatatcttccggtttatcggcgcaatctcacgttccgtggcccaggccatgcctcctgcttcagtgttcatgcttatcttggtcatttatactgggtttacaattcctgtccgagatatgcacccatggttccggtggctcaactatgtgaaccccattgctgtaatgataacttagcttttgttaggccccaccagaatatgctaacacgagacagtatgcctttgaggccctgatgatcaatgaatttggtggccgatccttcccatgctcgaactttgtccccggtggcttggaaatttacaacaatgcgcctctcagctctagaatttgctcgcagaagggtgctgtggcaggccaggatttcattgatggagagacgtacattaacaccacttacgaatactacagcccgcatctgtggcgaaacttcggcattctctgcgctttctttgtgggcttctttgtgctgtacgtcttctgcagtgagctcatccgcgctaaaccatccaaaggtgaagtcctggtatttccgcgtggtaaggtccctgcttttgtcaagaatgttcgaaatgaggatccagaggaagtcattgcatcagagaaaggtgcagttgctagcgaacctcaggactcgaccgcagcaattgttcgccaaacttccatcttccattgggaaaatgtgtgctttgacatcaagatcaaggggaccgagcgatgtatactagatagcgtggatggttgggtcaagcccggcactctgacggccttgatgggtgtcactggtgcagggaagacatccttactcgatgtcttagccaatcgtgtcactatcggtgtcgtctccggtgagatgcttatcgatggccggctatgtgacgattctttccagcgaaagacgggttacgtgcagcaacaggatctgcatttagagactagcactgttcgtgaagctctggttttcagcgctctcctacgccagcctgtcaccattcctcgccaggaaaggatggcatacgtcgaagagatcattcagatgctcggtatggaagaatacgcagatgccgtggtcggtgttgtcggcgagggcctcaatgtggagcagcgtaagcggttgactatcggtgtagagctagcagccaagccagatttgctgctattctttgatgaaccgacctcgggtctagatagccaaactgcttggtcaatctgtactctgatgcgtaatttggccgaccacgggcaggctgtactgtgtaccattcaccaaccttcggcaatgctgatgcagcagttcgaccgtctattgtttctcgcgaaaggaggacgtactgtgtactttggcgaccttggcccgaatatggaaacattgatcaaatatttcgaagacaaagggtcgcttaagtgtccacgaaatgcaaacccggccgaatggatgctcgaggtcatcggtgctgctccaggttctcatgcggatagagattgggccgagcaatggacgaacagtgccgagcgtgcagaggttcacagagagttggctgaaatgaaaaaggaattgtccaagcagcctgtaccccttcgcattgcagggtacggggaatttgccatgccactctggtatcagttcctcatctgtactcaacgcatgttccagcagtactggcgatctccgtcgtacctatacgccaaagttctcacatgcactgtcccggtaagttatactcctccattttatttgattggactaacaggtatagccactgttccttggattcaccttctggcatatgcctaccagcctacaagggctgcagaatcagatgtttgcaatctttatgcttctcgtcatcttcccgggtctggtccagcagatgatgccgtcctttgtcacgcagcgttctttgtatgaggtacgcgagcgaccttcaaaggcctactcatggatggcatttatgatgggcagtatcctcacggagctggtatggaatatcctaatgtcggtgccaatctttttcagctggtactacccaatcggattttatcacaatgcagagcccacgaatgcagtcatcgaacgaggcggcatcatgtacctgctcattctgcagttcatgatgttcacgtcgacattcagttctatgatgattgctggaattgaagagcccgataccggcagcaacattgctcagttcatgttctcgctttgcttgatcttcaacgggtaggctatctgcgggtatttggtaattaattggtaatagttctgactggatttctagggtactcgcgaaatcttctgatatgcctcgtttctggatcttcatgaaccgggtgtctccattcacgtacttcgtgtcgtcggtactctccacaggcctgactgggacttcagttgaatgttctagtattgagtggctcactatctcgcctccagatggacagacttgcggccattatctggacccttacatcaaggctatgcatggcacattacgcaatcctggggcgtcgaaggattgccagatctgcccaatgtcgagcacagaccagttcctcgaaagcctcaacatgccgtactcggatgttgggcgcaacatcggtttgctgtttgtctacgtggggttcaatattgtcgccgcgctcttcctgtattgggtcttccgcgtccccaagcattggtcgcgcaaggccaaggagacctaagaaggttgtcttctttcttcttcgggttgtggggggtggttatggatgtcggttctattcccgagtttctactcggcgttcatattctcttactctgttgctcctgtcacagagccttatcttgtcgaatgtatctcatacatgtagcttatgttaatgaattctgtattattttgtaactttttgcgcacgagtatccatcattgggacatttctgtgggcagagatgccatttggtacttgtcaataggaaagcagggcaatgggagatgggcgagaatagcattgtcaatccttttacaattctctacatcacaaagtcttcgtcgtttgatgacttgtttcttcagcgaataaatcccctcttccatcttctcctgtcatacgcgtgacttgtcgagcttctctgacacgaaaaggcctaaggcattgcctttgcgttctttcttggctttgccctttcttgactttgattaatcaggggtcaggttcgtgttctgggtaatttgctccgacttctttcgcacactagcgtcgtattgtttatgcgcataagtacacatgttcaaggtctcactcttctcttgtcagggatatctcatggttgtcttgtgagacaagcttcttctatgatactgagtcagaatgcaagcctcggttaatctgtccctggtgaacttaccgagtgcgtccaaggttctgtctatcatgtaacatccatgcgacaacataggcaatttcctgccacagaaactcgggacgagcatcacgatctcgaatcatcggtctgacttcagtaacggcgaacgtttcttgggaggcgtcggtctcaagagatcatggtattttgatcttggatttcctgaaagtctgtttgttagccagcttaatcaccatcagctagtccagtctcgctagtgtgaaatgacctcttacccataatggacttcttctagtccatacttgtggatttctctcttgtacacggcaaaggggagtgatgagaggttgtgaagtagaagaaaggtcaggggtgagaaaggttgagaagtgaaagcaatgaagaggagtgtggggatcgaatcaactcaattcagtacttcaagttcgtatagctcttttatgaaatgctgaagcccctggccgtccacgcaatatatatctccagcaaaagtcaagatacaccctaataccaatcaagcaatgcgacttggccattcagttaataaaatcctctttcatatgtactggaattgaataaccaaatatctctaaaagatctataaaataaatcgaaagcgacgattgggttggccggtccccgcttatcgacgcggaatcaacagtcttctcctcctatccccgcgaactccatgccaacacctacttttggtcctctgtacaacctcagtcatagtcatacagctcacacaattcgccggaatacctcgagagataccaatagcgccctccgccccttgcttctccggccgcgctgtccgtaccagcgactcaactcaccatgtacgctccatctgctcagtgaatcgctcagcaactaacatgccttctaaccccaggggcgtcttctccctgatcattatcaacaaagccgggggcctcatctaccagcgcgagtttcaatctggtttgcgcaacctctcgacaaatgactacctcgtcctagctggaacctttcacgggtaattcaataccatctctctcctggaatacccattgactttgattctatagcgttcacgcgatcacccgctccatcacaccgaaaattcccatcgcccaacctgctccctctacaacctcaacgggcaccgccgctcctgctgcgtccggttactcctacccaaaccccggtgtaccagtctccggcttggattacctcgagaccgacaagtttcgattgacatgtttccagaccttgacggggacgaagttcttgttgttcacggatccgttgacgggcggcgtggacgcaatcattcagaggatctatgagctctatgccgactatgtgatgaagaatccattctatcagattgagatgccggtgcgatgcgaggcattcgatcggcatctgggcgcatggttgagggggaggacatagccccgacgcgccacgcggatatcatgactttacgaactagatacgttttgttcttgtacttgtgtccggatatcactccgtctcgtataataccaaatcacataatatattgcccttgcacactgtagaacgtacccgcagaaggtcgattctcgagaatacaagacaaaaacagaagcaaacgccgggtatgcataacagtcatattcaaatcttcgatcggaccttacgcggtgtccatcttgtcctcgtccttcttatctttgtcaccgctggattcgccatggccctcttcggggatgttgcccagttgcgtcttgccttcctgttcttcccggtcgcgcttctccttctcctgtcggttcttctcgtcctccatcgataagcgcagagcaaatgcgagctcggggtcgttctcggcggcgtcatcaaatccaaatccacccgcctcaccctcgccgccgcctccaccgacgtcggcatcctcgccagccaggatcggagtctgttgcagctgatcgctgagaagatggggtcccggtgggatgatagcaaggtaggaaccatcaccactcttgacattgtcaacgagagcctcgagcttcttggtctgatcggattccaaatctccgaaagctatcacgtcgatcgacacgttgttcttcttcatcttctttgcgagcttcactagagtcttttcatcttcttcgatgggcgagcaggagaatacgatgatgcgttgacgctgggatttttccatacggtgcttgagtgccagctggaatgccatcgaagttagttattgagagctggggacctcggagattggctggaagaacgtaccgctgcaacctggatggtcgagctgagatgagctgtgccgtggatttttgtttggtgcaaaccagcgaggattgcgccaaactcagatgtgaaggttgacaacacctcggggcccttgccgcccatgctcataagaccgacagctgactgggggtttacacgcatctttgcattgtggatgatgctaacggcatcgacttgagattgccaccgggttgatctgtgacagttagatctcatccgcagatgcaaatatggtatgatcggatgtactcacgtgtagtctccattgcgactgctttcgctgttgtcgacactgtagcttggagttagcagagtaagctaatctggaggatgtgcaatgacggacatgatcatagtagcttccagcgtcatgatggcggaatttaaggaaattaacgatgtaaagaagggcagaacagagagtgaataggagatcggcgtatgagagacgaagacggatgacgaaggcgaggtggaagctctgcattctgccactgctccccgcccgaggcacctgtttgttgtggtcttcctggctccgcacttgtacttcgacacatcccaagtctatattccttgaaatttacccaatgtctgctattaaacgaaagtctgacgctatggacgtcacgcctacgggcagtccttctaaaaagatgcgcttaacgcagcttcagaagcaggccctgatggacaatctacagcttgaaagtgggtttaattgtgggtttgcgcggtgaacacagcactaatcttgctacagtaactgagcgggcacgtaagcttcgtgcccaatatgccctgcaggcaaatgacctccgggcgcgtattgagcgacgcgtcaatcggatcccggtctcgctacgcaaggcaaacatcggtgagctgctcgaaaagcacaatgcagcctcaagcaaacaacgggttgcgtcgccttctcggaaacactcgcccatgaaggtgtcgcgtattataccaagtatctccgtagaccaagaaacttctaccacacgcgatggtagagctcggaggggaaggtacgatataccacaagcccaatttggttttcttactgacagaatgaacagccacgatggtcacttctctgacaaagagaatgcccccgccggttgcgagtctgaactcaagaatcctaagcgtcgcgtgaagccagccggaccaggcggggcctcacgcgtggcatcccaggaactacgaggcaacgagaaccggatcttgtctcccaagtccaataattcccgcacataccctcactcgcccttccgtgcatctcccgagaagggtcaaccctcgtatcttgcacgccctacctcaccgctaaaaccgaccagtccgttgcgatcacgcggcgccactgtctctgcggggaaggaccagcggcctccttcgcaggcccagaagactgccccccgtgccgctacaggacccaaacctgctcggtcacctttgtcgcgcccggcgacccgacaggccgagcgcaagaacagcacagggtccaatgtgtcttcgggtacaacagtaatcaagtccacacggactggtactggcccgagaaaggcaaccacaacatctgccgcggctgccaaaaagccgactgcccgtgggcaggcggtatcaatggctgtcaagaatccctctgcgactgcttcaatgcgcaagactaccgctccggctgtggctgaaactatgccccgaactcgagcgctacgcaagcggatttaggacgcacagacatttgtcttcttgttttggagttggttgggattatgtacctttgagcgtgggtgattacagactgcaatgaacaatatgagcctggatgctgtctttcctgttgattctttggcgcgatatcataatcggagttttccttttcgaatcttctatattcatagcttttgtccgggtatctcacccagcttattttcgacccaatactttgccgtcatagccatctatctgtgtgtatccgtctgaaaatttcaaacagacctgggcaaatacgagacccctgtcgcttgcctaccaatcaatgatattgctttttccatcacaccgctctcccggtgagttcattccagctcctgcccagctaccacaactcgggcttcacataccgcgagcaccaatctccgtgttttcataatggagatcatccgagagtctacgtccttcgaaacccttgacggcagagtcatgtattgctgcaagaattttgtcgtgcgacaagatggtatcctatactacgggtcgtggaacgatcgatcatcgaaacctaccgatatcagtcagttcaatgatttgaggacgatcaccaccaacgatcgaggcccgaaaatgcaggacacatgggctgtggcatccgaggaagactgttacctgaaaacgccaggcgtcgtcgatttcctctattcaaagctggaggacgatattcaatgcgagcttaaagtgtgtgaagtgcttcgcagacatccacacccgaatattgctacttattacggctgtcgtgaggagaatggtcgggctactggtctttgcttcaaacgatacaaggaatttttgacggagaaagtcaatcctggatacctgaacaagaacatgttccgggctagtggtcgtgagcaagtcgatgattctctcagagagaatttccatgggattttggagggaatcaagcaccttcattctcttgggcttgtgcataatgatatcaatccgttcaatatcatgcttgatgagcatggtgtcccggtcatcattgattttgggagttgtcggaagacaggggaatcattgaataacagcagagtgggacagacagacggatggcatgattcaaaaaataagcttgtcttggaaaagaatgatttggatgcctttgaagagttgaagacctggctgtttggttctgtggatgatgaatatctgttccacgaggagtatcaatttgaggaatgctagacggagcttagaattgcttacagtacccgctctgattttaccatggctttactatcgaagtagaaagcaataactatactgtccagtgatcagaggttcagacttcagacttcagacgttatacccaagaaggcatcagcgaagtgcggtataggtgtattcagatatttaatctaccatacaagatgtacaagcaacatttaaaagatgcactagcgaatagacttaggtaggctcggatagtggtggtttgaattcaaagtgattcaaggttgatttattaggacttcacgaacatgcaaggttttacataagtatctctcttaggcaattacacagcacagttatcgtagcaatcatgttgattgaacaaataagaaaggaaataaaagctcccttggctccggttaagcaaaagacccgggagagaagaatcagaaaagaagaaaggaaaaacagggtctaggtatagccgtagcctggcccacgaaaaaaaggagcatgctcagaaatcaaagcgagagagaatggaaaaactggacattgatgcccaaagggacaggtatgggtatggctgatccctcgaatcagatgcaaatgaacaaaggtaaaaaaaaagagacaaagtattccagccactatagaaatagggggaagacaaacagaaaccaatcaatagcgaccaagcagcttgttgatcacttttggggaattttcatggaaaaagaaaagggaaaactccgtcaaccagtcctatcactggacaaaaaagaaaagtaaaaagaacgctaagaaggtcccaagaaacaagaagcgagaaacgagaaatgagaaagataaagaaaatccactggattgaatcagctggatgcaagtcagagtcggatgatgatgtatcacagtattgcagctgtgcaggaagtgtaaggagatccagtctacccagtaacacccatggcacccgcattcgggcgcggcctataagccacattggatggttgaccatcaggtgcccctgcgattggctggcttccgttgctggtgctacggtcacggcgatacgctgctgggggaggaggaccgaaatcaagtccggcctggatgttagtgctggacgagtgtgcgtgtccgctgggcccgaccacatggcgaaccgagctttgcatctgccaagctgcatcctgagatggatcagtctcaatacgcgcggaagctggagtgctattgtttcggttgggggtggtgatggtgaatgtctcgccaccgttctccggtcgctgtgcaaagctgcctcgaccgatgtcgccatatcttttaaggatttccttggttgtcacttcggcattctccctaaagagagttggatcacccaagaccgattgtaggtcttctggaatctatgaacagagtcagcacaatcctagcaaaagctcaacctgggcgatttacttcgcagaatgcatcgttgtacgtgatcagggcattaacagcctcgatggccaagaagctctcctccactgtgctgtttttgacattggggtagaggatattgggcgtgatcacagtcgcaagattatggacgtccatcttgcttccagactcttcatccacatgtgagaaggatgaagtccagtttaagaaggcaaacaggacttccatcgtatcacgatgggccttgggaagcagacagcatgtcaagtgaagtagtcgcctctgtttctctgtgtcatccatttctgcgatacagttagcattgcacttgtagaccgataatcctaacatcaaaacttactttgtgagatgacaaacagtctatgcagcttgaaagtcaagagaggatcgggcatttcacggaggaacttcttcaaaagagctgcaatctgcacgggagtttcctttgtcagatcaacttgctcgtacttggtgtcaattagctctgcggtgtccttcaatcggcggatgtttccgttctttcggaagacaccctccacagacatgtccatctgccgcatagcgcagacagaatcatcaactagcgtcgggatgcggagcgcaccaggaccaacaccgtgacttgactctgtgccctccttctcgaccagatagtctagactgacaccaaagacacccttcttcttattacccttcttgttatccttgaaggcacggccaaagatgttccatatggtaggcttgcgcgactcgataagggaaaggagctcttccatggtgaaatagccctcgactaacggttccatttggagtacagcaacgtggcgaacgatgaaatattccaaagcagttagttctgagaagtaccgcttggttcgggttggctccatcatcgcttccatatttccacacgatactccccgctggtgaccctggttatatctgggcatctcggtccccccaatgagttttgtaccagcatgcctgtaggcattaggtcgctgctccttggcttgctcggccgcaacaatgcgggggatgtcatctagcgtcaaagcatcctgagccccgaaagtcagatcagtaacaggttcgccattggcatcccgttcttcgacaatctggaaaccgtggctcctcgggtcaccgccatcattgccagatgaccctggtcgagcacttctgccttctggtccatcaatgattctggatgcgcgggctcgtttgtacgttgtggatagggttcgctcatttcgaatagagcgcagccgacgcatctcgccaacggtctgctcgagcgatgtttcttcgaggccatctcgcgaggaaccgccatatgactgggagcgtgtgttcgcccggcgaacctgggaagtgactcgatagccgtcattgttgtcgtaatcattaaggttggggtcgtctgggacgaatcaagttagacagactgccggcggcatgggggtaatgtaagagtatcctacctgaggtatgaggcaaggttcccccggatcgcagtacggcgagaagccgtgcgagtgccactttcagcaagaaaacgaattgctgcaattttgagactggagtgaaaccacccttcacggtggggccaagtttcatctggcgggcgcaagcgccgcagtagactttttcctcgctgccgctccacaatgcgtcttggaaatcagcggttaagtccttctcacatgatttgcatgaaagatgaggcggcttgatgtgccaacgactctgtcccaactgaacacattcgtcgtcaattggttctttacaggcaatgcaacaatctgaaagttgatcggccaagccttccactccagccatcaggtcgactggcgtatcgtcatcctcgtctgctaatgactccagatcacggagacgctctaggaagttttgtaaaccatctggcgcagacttctcgcgttcaagtttcagtgcaccttgtagaccgatgcggataaggagtttgaggtaatgagcgagaccagtcaccagagacaggagttcctgggtgacgccaagtttgcgtaccccagtttcctgggttttcgatagaagggcgaagaaagcgacaatctttttgcaaagaagtttggcttcgcggccataggaaagttctggttttgaatgatcagcgatcgccccggatgatataaaaccagccgcgcgggacttaccttttaactcgtgggatttgatgtagtctgccaactgatcgactgcaccgaagaggatttccacatgttcgatgaagcgctttgctacgagaacaccatcgatgtaagcgccgttactcacatgaagtagcatgtctgagatgcaagcggcggatgattcttcaaaggtagaaagggtgttccaaatattgaagaccttttcttccattaaatcttcttcgtcgcgaatatgcttgcgctcatcttcgctggcatcctcatccacgggcggaggctcccatgtttgaccggcaggggataaccggacattccagaacttgtgaatcatataacattcggggtgccaatgttgattttgaccgttgcggaagatttcgacaaactgtttcaggattgctgtgtgacatccatggcaccgctgggcaaactgtgttgagtagtgaaagtggcagtagaccttgctctcgtgttcatagtaagagtcctgcgcaccaaagacggtcgggcaaacggaacaggtgaagtgttcaatatgatacttccggtccaacgctgtaatgtatgatccgcgtagtgcgccgccgcactcatggcataggagacccagtcgtctaaagtaatcggtttcacaaagcggaaactggcagcttgaatcttctgaatcgacggggaaaaacttcgaagcaacgatctcgccacagtcctgagaggagtatggaagttagagaagaccccaaaaacgcgggctagaaaaaacaacttacttcgcacttgaaacactctagatgaaaagttccccctaatgctcgaacaaactggccagtgagagtttcgccgcacttttgacacagtcgcgatgaaccacctggagacttgttctgacgcccgtttactcgcgagcgatctcggggcgcggagcggtcgcggaagccggcctggtcaggacccagaccacgacccgagcggccaccatcctcctggttcgccggactgatggggcttgggcctgccgttcgtgttgacggtgactcgaatggaatcaaactatcttcgggagatgtgggtgtgtttttcgtatagctagccccgtagccagaggtgtcgacggtgggacggccgctgggattacctgcgaccaggctggctgggagtccaccggggggcatcttggtcccccgtcaggagaaatacggtggggtttgttgggttgaatcacgccgaacgctgcatgcaaatattggagagtaaggaacgggcgaggtgacgtggtaaacgggagttacggtaggtttgtatcgaagatgcaacgcggttacagattggcggcaaattgaaggtcagctgggcgcgtacggtcgagagtctgattcttaaattagaatctcatgccttggggtcactgttgttccccagagtgtactcaccctcatgccatgtaaagacacgcgggggtggctgatggaggagggacggaaataacgcgcgcgcaaagccagaggaatcgaattgaggaggtggtatagaggaatgttgtcgtgaacgaagggactgaaagcgcgcgggctagaggacgcggggaccggtcttcgagggggattgggagctttcaaggtgagaccaacagagggtgctgattatcgggccacagtcatcccaaactgaaccgacagcagattccaggactccaagaacaagatagaaaaaattaaggtgcaagggcgaggggaaaagaagtgggctggggaggaatggagatggagatgccccccccctcccctaattagttagggaccctgggtcacgtggtctatacaattcccatgtggacggtcaacttgggggagtgggtgacatattctagggtcttttagacatgattgcaggatatccaaggtcaaatctgattgaattgatctgagcacatggcaaacatcaacattgcactgtgtactatgtgcatgtagacacagcttcttgtgtactccataccgccccctatgccatcactgtgctttttatagaacactctgcagattagtgtttggtttttgtattttaatttcagaagtgacatggtagtttgtatggatatgtatgtcttttcccctaacatagcatcaaaggtggaatataggggtattttggattgacccttgactatgtcagatagtctccaggttggatatctcctaaggatgaaggatacacgaatacttaggtatctccatacatagtactccgtattacatgttagtttcttacatttcaaagtttccagggagatccatggaaaagtaatctcatcagactgatcagtacatttggattggtcgaagtatgttgatgttgatgggattacccgtacagtggagagtaggaggctggtagacaaaaaaacagacagaaatagaaaaggacagaaaatagaagatcgtgaagatcaggaaaagtaaaacacgaaagaaagagaaacgtagaaaagaccagaatacaaacaaaccaaaaacacgttaagggacaaactgtctagtcgccttgattccacctgactttaccttctctacctcctcttcatcctcctctagaccatccacaccattcgtgcttttaatacatctaggtttctattttctaagttgctgatcataactctgcgaccttcacgatacacccgtgaacacctgaccaactcacctcagacgttgcaagatgggtgaccagtgcactctgcgcctcgtccgagtacgtgcctttccaactatgattcatttgggcaaattaacccgataaaaacactaatctcacattgtcgccttaggagttgagacaggtcgagcaaagtgaacaactgggtatgagatctcttagcacttcaagccattccgtatggagacccacagactgacctcgatacagccttcactatctactacgaagaaagcaacattcgggatatccaggccctcatcatcggacccccgggcaccccatacgaactgggcttttacgaggtgagatccacccagctattcaaggcgggcccgggcacgcttgttgaactatgactaaccaattgtaatcgtctgccagttctcgatcaggatcccatcaggtaagatgatcttgtctttcatggcaggtccttgctaaatcatatggtaatagattacccagcaaatcccccggtggtgaaaatccggacgaccaacaggggccgaactcgctttggacctaatctgtatgctaatgggaaggtctgcttgtaagtgtacccggatacttcttttatacaacgcctgatactaacattttctaggtcgatcttggggtaagcttgtctaacaatagagggtttttatggagcatcgctaaacatcgcaacagaacttggcatggttcccgaggtgagcaatggtcgcctgcacagggactcgagtccgttctgctgtcaatccagagcctgttatcatcaaacccgtatacgctggaaccgggatttgacgacaacgaacgggcgaacgacacggaaaatatggagatctacaagtccaaggtaaagatcgctatcttgtcagaataaactggacaatgctcacatttatatcagattcgtcatgagaatctacgactagcagtcattacaccggttgaacaagccttccaaactgcgacgcctccccgccgaacggcgccaagggttggttgggagtctagcacggaagaagatagtgatcacgaactccaactcgatctagacggattccccattcaaagcaagtttggcgacttttgcaagcgacggttcctatggtacttcgagttctaccagaacgctattgagaaaggtatcgcggacgaggcacgcagacaaggaacgcccttcatccaaatgccgtttgaaggctatggcaattccatgggcggagaatggaactacatcgccctacaagcccgtttgttggctgtccgagaccaggtaatggaagagacaaaccgctgggccatcgagggtcttactctggtcaaggaggatgctgggattgccgttaaacttcggggtcggcatgaacagattgctgcagaaatgaacagttctcctcaagttatcgatctgtcactggttgatgataacccgttcgtctggagactcacctatgttggtcgcaacgagtccaagttggaaggtggcatcatcaagatcaagattcacatctctccccgacacccagaagaacagcctcgggtctttatcgagccgcccctgtaccacatttgtgtctccaaaatgggtgtgttgatgtatcttccttcgcatgctgaagagatcggccaacatatcgacggcatcatcaatacactggaagaagacaaccccccgtacaatcccctcatgacagtgaacccagaggcaaccgctctgtgctggggttcggaactagagcgcaggctttacagacgcaagcttcgagcatcactagaggattcctgagctgagctagctcactgctggtgcatgtttgctaagcaatatgtcatgcaacatgacagtattcggttatcgtcaccaactctccctcgcttgaactgtatcattttcctgccatcactatgtcttgccactgtgccttaccttacttgagatattctttatgatggcggggagactaggaattggcgcgtggcgtaccatttaacacagaaaaatcgatatcaaatagtattcataggtacacaaaaaggaccttgatgacgtcttgtgatcaagtgtaattaccgtctactaagtagatatagtagacggatgagacaacaagaaaggctctgtggctagtagagatggacggaccaccatcttttgactgtaatcatatagtttgtgtaaggctcggggcagttggaaaagtatgggtactccaagaatatcccaagaagagaatcaactttccaaggtcagctaaagtgggatagttataccaggaaccttgttcacggcacgatagtaatcacgaatcatacaatgcccatagacgacacaagacctcgggaggaacagataccaaggaattacgatgccacaggtcaatccaatgatcacaaatcctttgaatgtgtcggcgttgcgggcgatgtttcagtctccgccacttggaaagtgtgcgcacatttgcccgaatgttgaacatatcaatcatgtcagtcgaaagcattgctaatcccttccgtacttggcattcatcccaggacacacagcataatggtctctgaagacccttttccaacgccgaaatttcttgcggtcatcccaaatctcggcgatggccctgatatcagccatgatgttcgccccttgaggcatataagtttgtgacgagaaggccggcgtggtctgagcttttgtttgaggctttgggggttatagtgaaggaatcatttctcgaggactggcatttttgttgtcaggccatcaagcctgagggtttcaagctgtgctgccaaagcatcaagccgtttattggcggtcgacaccagagtatccctagtaggaaccgtttcggccaccctgtagacctttggcgaggtgagagcgccgatgttgtctggagtgccatcccttgtagatttttgatgtcataagttctccatgatgaaggcgtcgcgatgcaacattggagtcatctgaatatgagtagaaaacattgaagtcaaagcaggggcaaaggaaaagtcaaaagggaaggtccgttccttctttgtatatatttgaagtcaaccagcggtgcattcatggatagggtccatgacacatccagagacagcgaattccattcacttaaagtagttctcggcatgatatattatcaacgaagcaatgttcaatactacttccattgaatataaagtagaaaaggtggaagaagtagaagagtgccaagtttaaggcatagcccgcacggatcacctgattatctccgccaacttccccggccccttttcagtcaactcccatcccccatctccctacagaaaaatcatatcatgtcggcaaaaaggcgcacgttagagctaggcaatgtcctcgtggtcggaggctgtggctttctggggtggcatattgtcgatcacctgctgaatttcccctccgagaccgaccccagttacgctctgccgaagcccgttggcgatgcgcgcttcgagtacccgactctgaaatcgcgctacccggattacaactccacggtctctgtcgttgatttgcgcaccaccaacaaccgtcttcccggcgctcagtactatgacggcgatatcacttccgtcgagtccatgttggaggttttccgcgctgtcaagcccgatcttgtcattcacactgcctcgccatctatgattgagggcaacaagcccctgctgcacaaggtcaatgtggacggaacacggacgctacttgaggtcgccggtggcgaacatggtgattggggtggtaaatgcaaggcgttcgtctacaccagctccagctccgtggtccacgacacacagagtgatctgaagaatgtgaatgaggaatggccctacatccggggtcctgcgcagaaggagtactactccgagactaaggtgagtttttatcatttttaaacagatcttaatcgggatcaatcactaatcagaccccttgtctttcaaggccgatgccgaggaaatcgtcctgaagtacaacaagaagtccccgaatgagatgctgacagcggctatccgtccggccggaatccacggagagaaggatacaacagtcacacacaagatcctggagcacggatcccaagcatcggatagagtgttacggctgcagctcggtgataacaacaacctgtttgatttcacctacgtcggcaacgtggcttatggtcacctgcttgctgcgcaccgccttctcgcgagctatgaccttctcgcagctggcaagggcgggccccttgactacgagcgcgtagacggcgaggctttcaacatcaccaacgattcccctgtatatttctgggatgtcactcgtgccatgtgggctctgatcaaccgtgtcgttgagccggaccaggtctgggctctgcccgaaggcctccttgagattgttggtggcgtcgccgagactgtcatgggattgtttggcaagaccccgcgtctcactgcccggacagtgcgatactcatgcatgactcgctactactcgactgagaaggccaagcaccgcctggcttacttgcctgttgtgcccttggatgagggaattgcccgtgctgttggatacattgttgcccagaaacaagcggacgcaggaaagaaggcattgtaattgaaattagatcatgagattgaaaaaggcatcttatgctgtattaatatgattaattacatttacgcggttcatgtgaccatattaccttaataggaaagtgggccacccatggtttgttatatcagagttgtggatgtgttagtcacgtggaagtgatacaacctcgacgagacacttctcaacaagcagcctatctcctgcaactcattaggcctcaagcctcaatttgccatcacaatgtcccattttgagaagcagtgttctagaatcgattacgtcaacgaaactgggacattgtaatgcccggcatgcctgaagctgggtatcatgcttcattagactcgccatcagagtccatgtcgcttttgctcacaatattctacgttgtagccgactgaacaaccacatgtagagcgggatcgatattctcaggcctctaggcaaacaaacgttcgtcattgtacaaacaaccgaagaagatgttgagggccaggtgcaagtccttggtccagcattggagcctagaggcattcaaatgtaattaccacacaatatcatcgctggaacgacatagtatggttgcaggtatcccgggtcattctctcggatccagtataagaaccagacttgacaatctcaccaacgcggcatccggggtactccatacatacggagtacgtatctgactatatattagaataaacgtggcaattcttatttgtgtggcgtcctcttggcctgttcgcacttggcacttggctcttggacctttggactctctatcctgtgataggcgtgctatggcgtatccgacactacaggttgcgtgctgcatgtgagctggaatatgaatctgataatcaacccttgcatagcttcaatccaaaagcctcgagatacgcctcaacttatttttcttcgaggtttctcttgccgccttcctcagggtctttgtggtctgtgtgtactacgtcgtacatcatggggttaacaggaaccaggctcggagccttccgagcgtatttctttggatacttcatctgtaccgcaggtttcttgtttggctatgacactggaatcgttggcaagtaaagcagaaagcacatgtggttgattcatcgctaacagttttgatggataggtggtatcctcgaattcaagtcctacatcagtgatttcggctatacggaccaaaccaccgtcagcgctgtgatggtaagcttgcaaaatgtaggcgcattcctgtcggccctgggtatattctgggtgtccgaacggtacgggcgaaagaaaacagtccaggcagccatggccgtgttctgtatcggtgtggttttgcaagtggtaccttcacactcactcgtttgtttctatatcggccgatttgtcgctggtctcggtctcggtgcaggcactgcggtcgtcccagcatacaacgccgaaatggcacccaaggaaattcgaggcaagctcggctcgggaatgcaatggttcttcgcactcggtgtgatgctgagctactggattgattacgctgtgaagctcacactgcccgtctcttcgaagcagtggcagattcccgttggtctccagatggtgccagctggagttcttgcactgggtctgtgtggtatgcccgaaagtgtgcgttggctggtcaaaaagggccgttatgatcaagcatgggaaagtctgaaatggatgcgagctagtgaaggtggtgacatgccctgcagagcgatcacgggacataggactaatcagctctcaataggctctgaagtgaaggcagagttcaacgaaatccgagtcggtcttgaggaagagttgcgagcaaccgagggcttcgataagcgcgaacttctcgagcccgcaaaccgctacagactgctcctcgccgttttcatgttttgtggtcagcaatgcactggtatgaccgcgctggcttacttcggcccgcagttcttcaaactgatagtcggtaacaacaccaaccagtcccttctcatcactggtcttttcggtgccgagaagttcattactgttggcatctatatcttattcttctccgagatgtggggacgcaagccgaccctttggatttcagctctattgatggccatttgctttattattgttacagtcgtcaaggaaacaacgccagagcccgatgcaaaagctaccccggctggtattgggatggtggctatgatcttcctgaccaactcgatctaccaattcagttgggggccattaccatggccatacaccgccgaggtaagtaatactatgctcgtctatgaccagctcagccactaataagcatgtagatcttcccaacacgaattcgggggattggaacctcggtcgctgtatcaacacagtggcttttcaactttcttttctcgctcgtgacgcgctacatgatgaattcgtggggcagttatgtgttccttttctatgcgatcctggatatcatcatggcaatcattgtcttcttctttgtcaaagagacgaaagggaaaagccttgaagagatggaaacaatcttccacagcaaggctgcatttgacgttgatgccatccgacgcgaaacgcttgatgcggaggaagttaatgttaatgtacagaacaaatccgtaggcctccctttagggtaacgaaaatagctagttagaagatgcgaaaagtctaaacatgacatttaggcagatacccttggattgaccaatcagagaccctggaatcgctgtaggaaaaaggggcggattcgagaaaaacttgccacttgcacttttccttctcttttatctcttcttaaattgtgaacaggcaaagcgtggatagttctgaacttttaaattgctgatcgattggaaaaggatgggtgagtggacagctatgttacccggcaaagcaggcgaatctatgactgacagtggtgtgtaggttattatgaggtacagtcttttgccttgctcaatagacagcatatctgaccgtttacaagtttcgctgccatttatgtggcgtgagcttcaatgtcttctttcgcctaaggtccggggagctggacttgtctgatcctcaagacggccgattctttgagccagacccgcttgattcaaaggtttatgatgacatggttgaagaccttgactatcaacccccaaaagatattggtgacaatgatccatatgaatatgattccgattacgaatcgaccgatagcatgagccttgacggagaagatgcgcgtgacaatggagatagcgaagacagcagtactgatacaaatcaagaccccgaaaggaaaatgtatgaccactgggtatggcaaactttcaagcggcctggccttacagatgatttgcttcgcgttggattccttgataacccaacgggcggctattcggtggatgctatctcacctgaacaggcgagcggctgtcgcaccgcccagttcctggtgcataactcactccagagggatacatggaagtctgatgaactacatgagccatgggagatcgatggggattggtctttatccgggatttgtgatggagcgccgatggacccaatagtgtttcccaagcgaaatgggttggaatatttcgaggcagatgatacgttcatttctgtaggtatctatcaagcgcttgttgcactgaaccgcctcaggggcccaacccaaagctgacactggtggaaagcagaacataccaccgaatgaaatagccatgccattccatccgtggtgctttgatatcttctgccgacaatccaaagtccagtttcaatgcatcaatgcgtcagggctgatgacctggcgtaattctgagtttgactatgattcacgtgactcatttcctcgatgcaaagaggttaaaagttcacagaagcagtggtggtttcatcagcctggtaccgagtatctgattgcaaacccccttgacgtgcctggactaccagaaatacttctggctgcggtcgagaaccaagaatccgatgcctcttatgacccatcgtatgagattgaatcgtctcaatccccgacgaaacgccctgtaccatctcacaatagtcaagccgacttcctctctgtccttccggccgaaatccggctcatgattatcgactatttagactctagtgacattgctagtctaaccgttgcttccaaggcattcactgaactcccaaatactgtgtggtatagactagtacgccgagaaatgccctggttatgggaagcctgggatgaatccgaatgcatacacagcccttcgatgtggacaaatatgcaaacagccgagctcaagtctatgatcagattacgaaaattttatgttgagggcttgctggtggattggtacacagagcgtgacgccgagaaagctgctgaacaccgatatcctatgacagtgaccatgccggaccaggtgaaattacctataaggaacaccgactggcgtcgtgttctattgcaaattcaacgcaattgggacatgcttaaggggttgcagaatcgacagcggatctggaccgatgtggaggagattataaggcggattcgcaagttggacgcatagtacaccggtgattttgttcagttagcctgcaatgtagtgaacttgggttttgcaacagtacaatatacgcactttcgacgcttatgcttgtaaatctggcgaaatagattggcagtcatacccaaataggaaggccagccagctcttggcgtcccccgcagcggcgaattgtcggctaatcaccccgcgacggaggtgacggtgaccgcatatatctcatctcgtgttactcctgcacgattagtatcaaaatccaatattttataaatggctgcctctgagaaacgccctgagatcatcgagcttgctcggggactggcaagagtgcccttgtgcgaggactatgagtgtatgatatctgggatgatgtgtgtatcatttaaatccttacactttgacgggacagactgttgacctgtctaggtacaaccccaacatcccgaaattgctagaggcgcggcatttatgtcggggacttgctgcagacttcaacaatctggacacaaagaccgtgacgtatgacaagatcggcgacaagcgtcttgagttattgcggaaacttgtcggcaaaattggagatggaacattcattgaaccaccatttttgccagactacggatgcaatacttcgatcggaaaggattgcttcttcaactggaagtgagtcttcatttccaacctatgtcttgttgaaacttgctaacaattcctagccttacgatactggacaccagtctagttgtcatcggtgaccgtgtacagattggcactggagttagtctcatcaccgctggccatgatactagcgttctttctcgccgtaaattcgtcgagtttggccatccgatctttatcgaagacgactgctggattggaagtaatgtgattgttctgcccggtgtgcgaatcggccagggctcaacaattggagccggatctgttgtcaccaaggatatcccgccgttctctgtcgccgttggcactccttgccgcgtgaagaagacaattcaatcggcggaagaagaggagcaggatcctaataatccgtaccgcagtttggttcgtgaggatcaatagaatttgatatagaatcaaatagaattaccggtagacgaggatcaccacccccgtctctgaacagcccacgtacaaatcccgtatcacttttctcaatgcgtatccctcatgtcctgaatagcgctggcgtgcaaccctggtattgtttctagctccaaagcacactgctacaatggctgcatcacctgcttttttaatcttcgacgagtaacgatccttggaagcgtcgtaactccacataaggttgggtgcatgcaacatggagctacccaacttgcggtccataaagtggacgctgtggtagcttactcgagatctaccaccattgctataatatgaagccccccgtcaagagattggcttatgtaaatgtctacaaggttcagaccagttataactttttttatatcagattaataaagaaaaatgaacgttatacatcttatccctcttgtaccttttgtatcggcgtggcatacaaagtatacgtgatgtgaagaagtatcatccggtgaaaaatcaggagcgcgccaacacctggaagtattgttgtgtgcccggcactatgaaccttgtactaacggtctacaaagagtaagacgtctaattcagttgtgtagagagcaattgaattgttgaggtgtttcctcatgctgactatgaaattctaacagagttgagaaccggtccatacctaaacgagatacctgaagcccttgcgcatacgtagcgactcgtctgggtgatcgatgatgtcattctcagtcgaatcccctctagcaccatcggcaagctcgccctcctcgagctggtggttcaagctgaccaacatcgagcggaaataccagcatccgccgactgtgacaccgaacatggccagcacaattccatagctggagcgatatccattatcttccaagtcccagacatatgaaccagcaacgttgcccaattgactgaaggcattgatcatagcaatggcgacggctcgcttggctggaggacgggggaatgaagaactgatccatgagtagaatacgatgaatcctgcgtaggaaccagcctgcaggaaaagcgcgacgtagcgagctgcggtgttgctggtggccatgcagatgatgaagccgacggctcccataccaatcgggccgatgatatgccagaccttttcttgtgttttgtccgcgtgccatgcattaatgacagagaagatacaggagaagacccagggaggcgcgctcatcaaaagagtcgggacatatccgaatccgagcgtaccagtgagggtaggctatgcagcaagtcagtaaaatatcccaactggttttttgatatgacaagacttacgaagaaagcattgaaagaaagtcccaccacataagccacaaaggtgaacatcattacatagattttggggtccacaagcgccattttcaggcctccaagagccccaagctcttcaccatcggtgtcagcctcgccgacatcctcgagcatgcgaagttgtgcaacctggcgctcttcctcggtgaagccacgcgcattatgtggcaggtcaggcaaaatgaaggcggcaaggatggcgaggaacatggtcactgagccttcaatccagaagagccagcgccacgcggcatggcccatgacaccttgcatgttggataggacaccagcaccaaccagtgcagagaatgcattggagatgaggttaccacagaacaggatggcgttccgggttgtgagttcccgacgggtgtaccacttggagaggataagcaaggcaccgggcaggaacgctgcctcaacgaaccccagcaggaaacggacagccaccatgtccccaaaggtcttagtgcttccagacaaggtggagataacgccccacaatatcatggcgacggaaatgtaaagcgagggccggctgatacggttgatgaacatgttggaaggcacttgcatgatgatgtagccgacataaaggatactcagacatgtagagtagtcagtattgctcagtttgagatcttcctgcagacccttgagacgagcagctcctagattgttcctgtcgaggtagttcatgactattgagcggcgtcagcgatgttgatttgatgtatatgccgcacggcggcgggttcaaacactacacaaggtggtacgcactgtagatggcgacaaaaagactgcacctagcatcaagcttccgcttgagcttcttctcgacgactatccggcgagctggatccatctgagccacgccatcttgctgtggtgaggcaatgtgttcgagattttcaacccgttccttctcggcctcaatctccatccggtcacggttttcccgtgagatatcgtccgccattgtgtgtgtgattgtgagcaaggccagagaatccggggaacagaaagagcagattcttgcatttaagcggaaagactcttctcatggttcatcccgcgctagtatttttccccggtacccccacgcctagatcgtatgtaaatcgtacgcgggggggatactacagtggagttgcggttgaccgactcggcatccgagagcaggagacgtcccgaggaggcatctgattggatatgactgaaggggaatatgagggggggaagtttcaccccgtgttctggtatcggcacgggaactttttagggtcacaaggtcacgggatcacggctctcggacttcactgtctctcacgggacgcgaggaaaacaccgaaaaccccacaaaagccagaagaaaccgggcaaacccgggagagaccggccaaaacaaaggagccaaaacaaatcttggaagtcagaaaagccgatatccacacggaatccgagttcggcatacggcgccaatcccttacaccttccccgcctctccgcagtttgttccctctcttttctctcaccgggatcatgaatgagatcatatccccgcaaagccatttaattcgagttcaatggaatgtggggaaagatatacacaacgtacgatgttgtatgttgaaacgggccatacggtctgaagtacagtatcgtggatgtgacccgggaaaaacttgacaaatagattctcgaccttctctccacttggtgagagtttccgctcaagcccatacggcatttgtccggtaccccacgctcggtctgccgatattttgccgcttcctcagttaagtgtctagtctagttgtttacattgggtagatggacaccggtggcttcggcctgctccgtcagctcaatttcctccacgcggtcatcctcatgccacccctctcggtcgtctttcactagtcggacaaagcacacgtcaagtataagtgctacggcactgatggcaacaccgaagaaaagtgccgctcgatatcccgtgatttggctacccgagcggcgggcaatttgaacctcaatggtagatgcaaagcctagtccgagactgtttccgtatagattcaatgtgccaatcaccgacccggcaattccctgctgatttcgacgcacggagttgctggcaatgatctgaccagccgtgtacacaaagtccgggcagaatgagaagaggaccacggaaggaaaaatctgcggccagtaagattgatggattggtacggtcgccatgagcacattggaaattaagatcgtgacggttccaatggccaggatccattgtgctgccattcgcgggatcatccatgctgcgagacaggcagcgcccgtggcgcagatcacgaagggggtccagcctacggcaaattgtaggggagaccagtgccagactttttgaagccacaacacttggtaccagatcaaggttcctacggccatataattgagaagcacgaccaatagcagcatgaggaaggatggagctttgaagatgtcgagtggcatgatcggctccgcggcatagttcctttcccaaagcaagaagcccccgaataggatgattgagctgatcaggagaacgatctcatagggggttgaccaaccgacactcggtgcttgactgtggaatgttaacatgcaatccttcgggttaatctcaacaacttacttccaaacaaagttgaacaagatcaacgagcttgttccaagagccgatccaatgcaatcgatctttccatgccgatcggctggtggttctcgcggactcaaagcccagagaggagtgaatgtggtaacaccgaggcaggcactgtgttaccaacgcatcagtacctacttatgatccgggttcacggggtctatcacctacatgaagatgaaaaaccacttccattctgtccgctgtagaaaggcacccaaaagcaaggccccaaaatatcctccgactggtgccgacgcaccaaagagaccgagactgagatttcgcacgcgaccggggggattggtgctagatatcatggccaccgcattaggcatgatgaacgcgcctccaagaccagctagagcccgcatcgtgacaaaggcgaagaagttgttacaaaaggcgctggctagagtgcagatagtgagccaggcacccccggctaggacgagttctcggtggccataaacatctcccaatcgcccactcaccaacacgaaggtaccttgggttagactgtatttatgttagtgagatggtgtaatcataaacatctagatactctgtgccttacgcatagctagcagcgatccacgaggcgtaggtgtcgtcaacgcccaatgattcactcaaggcgcttcctccagcaatgcctgcaaaattgactgtcatctgatattgtcagtattggaggattttctgctctgaagaaagttgacggctctgagtatacctgtacgagattagccagaacaagcaatgcagtaatgaccactcgacgcgatctggtcgtccgactgggcagtgcccgctcaaagacaagttggccatctctaggggtcagattgtcttctactgagacctgcgtgtctggaacatgttcagctggggtcgcgggggtcgggtcaagctcttgggccacagtagacgatgcaacaggcttgatgtcgtagtgaagagcatgtaagagcgacatggtttgataataaagggggtgtttcctattctttgtgactagaaatagactaaataagatctcgagtttaagtagacaccatcggagaccgggtccgagctactgagcagtagacgtaactgctttgactcattctcgatgagagtcaccattcaattgggtgtgcattcatccatgtctgcaactgtgattgatcagcatagcggtgctagatccgtgtgcggaaataatccctgatgtacacacattgtacttggagatggatttttgtatcaagagattgtcagacaagactatatcataagcagataccttgctttactttatatgggctggcaatagaagacatgaggtgcagtcgtttctgatagactactactaagttatccgattccttactgaagtcgctaaatatccttccacctcaatatccgccacagcaagcggggaaatttcacaagaaaaaggcttagggtcgatggtgaatgcgaatctcggcgtcatcttgtttcttagtccagcgctcatgataccagcggtatatccctagcctcgaaacactacaccagaataagaatgtggctatttgaattttgttttagtgtcgagcagccagaaatgatatgagccctatagatcaaatccttatacgatcggctgtcgcgcggggtaaatcaccgtccaagatgaactcgtaggaaatttatcctgtctctggaggaatcaactttcttggccatagtattcgaccttgtcgtagtagatgatgtctccataacccgctttgttagctaatatctgctaagcatactggtttgttgccttgatatgttcggtgtatcgatcgatctccgtaggtctatcttataagttcctcggaagtcagtttatgagaaataagaatagtacgtcgcatatgcggtcaggtcattttgtaatcatttcggtggtcttctaagtgtatttttatagatcttccacccattctcaggtatagcaagtctggctatcaaacgaaagctattacaggaaatcctcagcatactcctcatacttctgcatgaagtcctccatgttgaacttatccttcagccgcttatctgatagaatgaaattgcctgtctcaatgtatccttgtcggaatgctgtgaatagtgtcgggctcctcaaataatgtggaatgaaacgtttattatcccctgtcaccattgcccctttgaaagcttgataaacaacacctgggtcctgattaaggtctactgcctcgcattgtccaaaatctaagagatatagctgaacggcgcggtattgaaagtccggtccatgctcctgggcatctatgactgaagttccaagcacaaactccacatcatcgccgttgacggccgcggcccaatgtaaggttgcataggctttgcccatcgcattcgcaaaggggagagtctcaacgccaacttgctccatcgactcaaggcatagagggaagtttcgcagcggaatctcgtgattgatggtaccattttccttgccgagataaatacggataagacagtgcttgttttcagggtggttaaggagggcttccattccagcactatcaagatgctgctcgggggcacagaattgggagatcaaggcttttcgtacgacttttggtaatggaagaatccgttccattattaccaggttcccaggtactcgatgatcctcgggagtttttggtaagattttatcccagaacccgctattctctttcctagagatcaattcgaagggttttggaacgtggattcccccgttggtagactggtaatgttcgaatgcggccgaaacatcacagtgaatcttatactcatgatagaggtttgatggtagcttttcgtttcctggactttcttttttcaaggccagcggcttcccgacctgttcgaagatagctccctgtagaccagctccgatttggttgagttgttgcaagtcgggtcgagaacttgcagtctgagaaaggcggccgaaggaagaggccgtcaagataacagacttctggctgagggtctgtttgagaatttctgaatcggtcatgcgcgcgagatttgatgctgaaaattcccgagaagctctggcattctctgctgagctagccgattcatccctgccattaccttcaaaccgttgatccatagtaatcggtgctgatagatggcttcagttgttgtgtattgtgtattatgtgctgtgtgtgtgtgtgtcatgtagtcgtaatgtcctgtgttctaatcatgacgtccacaggccacgtgctcgttcccttctttccaaggttatgctatcaaagtaagcgagaacgatctcaatagttacgtgtcagagcaagttcaagttaagctcctatggaggtgactgactgtacgtcagagcaagtgaaatgagtataaagcccgatatttatcacaatcctattgagtacagcgtgtttgtcttattatgttcatgtatagtggcaagatatagacacgaatggcacccactcatatatgatataggtagatgggcagatggtcaaacgcccacaaatgtgccatcccttttttcgtttgctctccggccaaatatgaaatgtttcacacttgatttctcactctcttcccttcacttctctgttccattcatctacaacttctttcataccatctcacaacatatcttgtactaaaccacttccattaccttcttcgtgtcaaaaaaggtatataaaacaagtttccacaatctttgattaaccaagctaactagtgttgtcaactggagacatcgactacgatgaaggtcccccttggtccgtcggagcatccaaaccagcttttgcggaagcttggggcccagtatgacccggacctgtccattagcgatgcttttcgtctcgttggcctacggcgaggctggaaacaaggatctaagacttggaagagaaattggaatgcttgcatgaatagcgagtatgatcggttgattggctgccgggtctctagtctcgcaacttggcaacagctatgtgctaaagtgggaatcaaggattccttcagttcaatcacccagtgcaagaaggtaagacgataccactatctattttcaagtcacttgcttactattgtaggccctggtccgtgtccatgtgaacatcgtcgatgttctagattcctggaactccgatgtcaccccaatttgtttcagaaacaaggacgctcttgctgcgtatacccagtccagcaccaagttctttggccgagagatcgcaaagcaggataaggttctccgagttctgttgcgcaagctgctttgaagagtacagcgacatgtcacttccagggatatgatcccggagatgtactgggtgcgcagttcaagtgtggacgaaatcgatctgggaactacacgacaattgaatgtgggaaatttggttttgaatagctgaaatacctgaataacttgttgaaagcgttgtgtttctccatggtatagattatttcgggaggtcctcgtaatgtacatggcttcggtgtccttaaatgctgtcgcggcttcttcatcgtcatctcattacccccggtgttagaagagatatgcaaggtcccgaaactgcaaacgtcagtacggcaagctgagcctactaggcacctacaagacgggtatccaaaacaatagtatgtctgtggccgacaggcaaataagggttccgtttttacctaggcacaaaacaccgagtggcatgcaagctctttccaataacgaaattggaaaacattctctcaaatatcaccatatatcttctaaatacatctgattcaaggtatcaaacatgttgtagtcgctgggtagagaattggccgagaatgcaaagccgaggttattgatgaacagctcatcggggttagaagctgccccaagtccgattacgtcgttgttatcatgttgagtatcgctcgcagtcggaacatcaaaccaattgatatctggaagtgctgtgggcaaaatggtgttttcaacatgcaggtcttttgggtcgggcagaccttggaaggactcagtcggggccatcggccctggatagagatccccgtcttctggttgatatggaattgtgcaaaggctattgcattccaatgaaggagcgggaggcatgtgatcaatatcacagttcagtcgtttgcaatataatttctccagattgcgtccgatacgcttcgcgatattccaggacgtcgagagttcccgcaggacctgaaggcagagtcccacagccgcctgtggtgatggacctcgcaaactctggttacctgtcccagttttcacagtgggatcaacgcaccatctatcaatgatgatcgatgccgctgataggatgcagtgtgtggctgtcatggggctcagtttaaagctgccaaatgtctgtctatatttctgggcgacaatgcacattcctcgggcggagttgctacatatggtcatgactttctgtttacaggcaggcccccattctttgtggcttctgttctgttgtgtctgtgggtctgggggattgccaacatcttgagtggcagagttgttgctcagaaagggcacgcaaagtaaaatgcacacagtatggtataccatgcacaaagtgtaggtgtgaggaaatctggagggaccagattgacggtcgactttgagctctggaggtagatcgtagtaccaggtcttaagttcaagcacacaggattcaaaaaatgcgcaacgttgttggggttggaggagtggctttggggaccagcttgagcgatatatgtcagtgagacaggtagatgtaagaaatgacatggtagacttacaatgtaagaaggactttctcgaatatacgacacaggtcaatcattgccctatgcaactgtaccacgtctctttgagaagcggcccttaattgtctattgccatttgctgagggcaaatagacatccgaggcacataaagggaatggtttgttgacgacaccctgggagtcctgggtgataaattaacgtgagtttcgacgcaaaaaaattattgcctgtggtacaacataccagtaacgtgcacaccctccccgtgtagctcgctgacaatttgtcgtgacaatatagagcccaataaatctgccttcgcagctcaatctcgatgggtggaagagcaactgctccggaaaggaccgagggatccatgttgaaacccatgtctaaggccaggcgattggccataccttggtgaagccagccagcagcatcagaccccattgcctatcagatattagtttgattggctgggtgaaagtctgagatatcacacttacaatataagccatgcccatgattgccaaagactggattgttgtgatcttgggccatctgaggtcgtgttgaatcaatctttctgccctatcaagaaatattttgccggctgtgtttgaatcattggggtctgatctcacttctatgcgatcgcagtaacgtgaacctacagcgaggatgcaatttaaaagaagggggctgaagtatcgcccaccacatctcatagattctcgaaacagtttttcgtttaccacctgaagccatggctgttcccactcaaaatacaggtcgagcaagtgcgactgaagctcgtcttctggtatcaagctttcttctaatgactctgtactcccattcggcggtgtttcaccagtctgcatgggagggccatcggactgatatgcctcttcgctgggcgaatctggagatgattagcgaacctctatactgtggcgaaaaaaagaatggctactgtaggcttgccttttgatgaagatctaaatagcaatcgcccacttgtcggtccaaaataccgcacctcgccatcttgatcgaaatttaatgactcgtcaagcgtcaatgcgccgtcaaacgtagtacacaagtcatcaacattcgaggaagccggagcccactcagggttaggctctccattttttatcatcaattgaatggcagcatcagggtcaataccatgcgtgtgcagtacacgctccaacagttcaatgcgattgcgcagcatgactacataggacttaggtgcgggttgccgcccgtcctctgctgtggagtactcgcattgaacgccacggtcaaggcagcgagagcaagatggtcgaacaccatcacactattttaatattagcacaagctttgagtaatacttggtggaacaattatgatcttaccttagctcgtcgttgtcggcatgtctcacaggctcgggacgtatactttctacccggtcgcttgcgcctagcaggttcatccggtgctgtgggcatagctgaggtatacgggaaagaggaatttgatccagtgcacagtagactctagtactttaagcttgagattggaagccttcgactacttgggattcaggaatggaatcttccgaccttggagggttgcccaggtggaatggttgtgattacaaatcaattgcctcaggcaccaaggcataaagtagtcacccttacaattcaggccacagggtctgatgctttgcctcactgcctcacatcatacaacgacttagttatctgtataagctacagccaaatagaattgtggtttaatatttgacctgggagagttgttttcccaaaaagacatattgagaatgcggaacatattgtgggacagaactgacttcgtgtccaaagtatgttgtagttagtatatgctcctatacgtaatgacctctcgtcatgactaggtagagtttcatgctagacagacatgacccattcattaatacatgcctataggatatcggtgcaggctaaatagtgtagtaggaagaggaaagcgtaaagtttactcggggggtatctcctgttcgctccaaggtcataatgaaataaattgtcgtgaataagcctattccatgacactatcatatctatattgaagaatagcaatggaagatcatctccaaaaaaataatgaagccaaaccatcagctgactaccccgcagatgcgcagaatccaaaaaaaaaaaaagaaaaccttcgaaggtcggaaaagatgaagacaaataggtggagcaacattgaatgtggcccccgaacattccgggcctattcataggatgtttggatatattctaaggagagggggtagaattggagtcacgtagaatctccaattgtgataatattgtgctatatgactggctcaggttgatatggatcatgccagcaagggattatgagatcgacagtttctttatttccagatatccgtggaacaagtgtggattgaggatagaatactcctattacaccatttgtttcacagaatatctctctcctaatctcatactatcagatatcagtagtgcaaatgatgcagttggagagggaatgcgagctctcattgtatggggaattaacaattacatccggtggcgtccaatggacttggagaaatattttctttttctttttctttcttttggccttttctattttgcagattcggtggaaatatggctgtccggcatgaagggatatatatggtacgaagtacgaagtacatattacatgggttggatgcttttagacaaaagtactacgtctagaatagtgcttatctagatagtaccaatactgtctgtatatgtctagattcagatgtatttcacgtcctttatttgacatgtcatgacgttgagttacaaatataagatgtatataatacctataggagctctcgatggccatctcccaccacagaagggatcaacaaagtacaaaatcttgatcctatatactatatatgcacagtaaatgtccaggatatcaaataaaggacaagtcaacagaaaaaaaaagaaaacagagagaggtgggaagtacgtagtgcaggaaaagcacagctcaccaatcaccgccctcgactccttcgatttcccccccatcacgactcttcctcttaaacattctctcgacttgctcacttctacccatttctgtgacccttaggtctcaatttcgatccagtttcgttccctttctcgggtcagcctcctctgaggttgacgttgtcgatctagcgcgtcgctgtcgcgccattccccgcagagagacggcttccgttatcctccgtctaacgtttcgtgtttcaacctctgtgttgtctcgaagcctttgaatacacaaatttaacgttggattggtggactgccatcactccgagcttgcattgatctgttcccaagtcttacgacctcactatggacacttgatgctacggatgaatcaataacctcgattaagggcacccgcgctgcccagcagacggtcctgcttggctggaacaacactcttgttttattcaatttacctcgattcatcgcactgtcgccttcctaccccccttgaaccatgaatcccgctcggtcgccggagcgagccagcatggccagcaatgattcccccaaacatacgagtaagtaactaagtaaataagcagataagcctgcccctaccgccccccccccccccgggggggggggggggggggggggggggctcggaatatcgatccgaagatggctcggacattgagtgataatatgcgcgaggaacgtgaggatttgaaggaagcggcagaacagactttgaacatcattgtggatatggacctggagggttgcgtcaaatgggtcagcccatcgtggaagcaggtggtcggctcaccccctgagtcagtggagggccatatgatatcggaaattctgctgggcaacaaggatgtcttccgcgatgcaatcgaatccatgaagcaggatgattcgcggagtcgtttcattcgcttcgccctccagatgggaccggattctgtcctgaagtacgcccctgaaccaccaccggcggctagagagaaccgggccatcggggaaaagacagaggacaacgttgagaagtcccaggaggaggaagagcataatcacaatgtgctcaacatggagggacagggaatcatggtctatgaccggacggacgatgaagctggccatgtgcgtacctcaacaacctcaacaatgtcttgttgcccgccgccgtttataccactgacaccttctgaatacagaccatgtggatgttacgacctcttaccgagcccagagaagtgacaatcgatctgccgcctctgctggttgagtctttgggtgttggggcggaggtattagcgaattatttgaccgaattggctgaggctgcagcgacagaacccgattcctccaagcatcctgccccgaccccggtcctctgtcgcatatgtgaacgccagattacgccatggtggttcgagaaacactcagatctgtgtctgcaggaacatcgggctgagatggatgttcaaatggcacaggaaaacctcaatgagcatcggcatgtcattgtcaaggtcttagatgctttagaggcccgacaaggcagacctttgatcgggggagatggaaatcccatgcccctcccccaagcggagtacaaagggttagccatcggcccctcgtctgccagctctgctccgtcatccggtcctgtttcagagagtaattcagcgcccggcacgccgcctcggtcgcgcgaacattctgcgtccgatgctattccaaaccgaccgcgctccttcacagtgcggagaccactggctcgtatcgtcgaactcgttcttgacctgtgcgatacttcactagagattagtatgccgatgatcaaggaatcttcccggacagacacagaggacttccggacgctgtcaccacaatctgaatcgcggatctctcaggttcttcagtggcagtccccgagctctaacaccctggaacaagaacagggtctcgctgctttgtcggcagacactgaacaagtcgccaaggcaaaagtggatgccgttgtacgtcatcgcaagattgttgaatacgccgaacgaattcgcatagaatatacagtcctagtcgaggaatgtattggggcagcgctaagcaaggcggagcgcatagctgctggtcagctcagtgattcatcttgctcatctgatgaagaattggcgcctgagagcatcatcgacggcaatattactccgggcgatagcaatactgttgccgaggaagattccccctcacaaatcatgagccaagaaccgcaacaaaggccctgtccagcagcaccctctccgcggcgaccgacatctgcgctgactctgtcaatgcgtaattcgccagatcggtctttgctctcacaatcggagcgcagaccatcctccgcagcagtatccacaggttctaacagcccattggaatgtcctaccccgcgatcctataagagtgctgcaggactcctgggtacctcacagccttctcgactgggcctttccctatcggaaattgatgctggtgagactagcgacagcagtttgccttctgtcttcccgggagctataagaacagagtcaccctcatctgagaggagcttcgatcgaaagcgtcggagcctggtactgcctggactttcgagttctcctcgtcggcaaccttctcccgctcgaatttcaggtccgcattccccgttgcgcatgccaaagccccgtatgtctagcggcggtgaaagcctgccgtccccgatagcatctccgtctgcatacgcaagtgaattggcccttcatcactgccgccaccatcgccgggagtcctcggcgaattcttcagatatcacgaagcccccaccttccccacgcctaccttcgatgagccagcaacagcctcggcctgcgccattgtcgatccgcgattttgaaataatcaaaccaattagcaaaggtgctttcggcagtgtctacttggtgaaaaagaaggccactggcgagtattatgcaatgaaagttctgaagaaggccgacatgattgccaagaatcaggtcaccaacgtcaaagccgagcgtgccatcatgatgtggcaaggggagagtgactttgttgccaagctttattggacattttctagtaaggattatctctatttggtgatggaatatctcaacggaggtgactgctcatcacttgtcaaggttcttgggggtcttcccgaggattgggccaagaagtacattggtgaggtggtgcttggagttgaacaccttcacagccgaggcattgtgcatcgcgatttgaagcccgataaccttctcatcgaccaaaagggacatttgaagctcaccgactttggactttcacgcatgggattggtcggtcgtcagaagcgggtgctgaagaaccccgatgagtctgctccggatctactgaaacaaaatgcattcccccgtgcgatatcgattggatcttctcgatcggcctcattcgactttcaagcaagctcatcacctggctctacaccactcatcaccccggaagtgtccgccagtgccgttcagccatcctacttcagcctcaaccagaatagtttgagtcggcaaagctctcgtcgagcttcgggataccgcagcgatagcatgggcagtgatggtctcaatggaatgttcagggcattctcgcttaatgacaatacacacgaacctcctgtctcatcgccgagtatgttttcaaccagcatggttgaagaagagggccaaagcgaggccggcgagtcccctcgtcttcaacccctgcatccaacattcagcaatccattggcgcagaatacccctccccatcaaagcatgatgcctccagtgatggctctttttgatcccgaggatcacaatcgccgttttgtcggtacccctgactacttagccccggaaactatcaacggcattggccaagatgagatcagtgactggtggtcattgggatgcatcatgtttgagttcatctttgggtacccacctttcaatgcggacaccccagatgaagtcttcgaaaacattctccatcgcaggatcaattggcctgaggatgcagaggagttgacttcagcggagtcgttggatctcatcaacaagctcctggctctcaacccccgtgaccgaattggagccaatgtcgaagagaagttttcaaatggcggtgcggagatctgcagtcatccttggttgtctgacattaactgggacacactgcttgaagacaaagcacaatttgttcccaacatcgaaaatccggaggacacagagtactttgatgcccgtggtgctactcttcaatcttttgcagaggagttggaagatgagaactcaccacaaacgtcagcttccgctggccccgaccgacctcatgatgcactgttcaaggtccgttctcaagtcaattcgtcgaaacgacctttgatgccactgcacattcctcctcacgttcgtgatgctcgggattcacgaagtcggagactgagtgaaccagccttggccgatgattttggcagcttcaactttaaaaatcttccgatgttggagaaggccaacaaagatgtcatccagaagatgcgccaagaggctctgcaggcacagcaccgacaacccagttcgtcgtcggccgctcagacctcgagcacttcatctcagccgtcattggaagggagcccactgccaatgtcactccagcgaactctgtcacagaacaagggcaataatcgaccttcttccccatcaggcctaagtcaaacaaactcatctcccagcaggccatcgcagccatcttctcctctcctagttcagttcagcactgggaataatcaagagcggcgcaagacgtcgggctcctcgtcagcctcctaccaatcgagtggggcctttcagccttcctctgctgaccagggccgcatgccaaatcttagattgggctcagtggcatcctctcccgtgaaatccaaccgaatgccagctcactcccctgacaagacgggcaacaatcaacgccatggcagcgtcccagcgagccgtacccgttctcacaccattggctctcaagatggagatgtttccgcgttccagaaagaaccctttgtgccccatcatcctaagcgccggagtcagctctttgatatctcaccttcatcctccgacaatgaggatccacgcacgaaggcactcttgaaggtccaacgccggcgacaaagctctcgacggttgtcgcaaatcaacatcctagaagggccctttttccggccattggatgtgctcatttgtgaagatcaccctgtctcgcggctggtcatggaacgcctgttcgaaaaacttcgctgccggacgatcaccgttacgaatggcgcggaagctgttagatacgctctcagcgaggttcagttcgacataattatgactgaatatcgacttccccaagtcaacggagtagactttgctcgaatggtacgggagacacgcagtgctaaccgacatactccgataatcgctgttacgggctacttgaaagacctcccggagaatcacaacttcgacgccctgattcaaaagcctccgacactacccaagctgaccgaggcgctttcccagtggtgcatgtggaaacctcctccaacggactatgttccctcccaacctgttcctgttcctgttccgggatctaatgctcggtctaccgccgtgatgaatgaggacagccctagttccgcatcctctggatttgtccttaatccccccagctctcaccgaggatcaagccgcgaagattcgctcagcagcagtgtgttcggagacatggagtctttcaaacccgaaaccaaacccgaggacattcctctgatcataaatcgaacgtctgatgattgggatcaaggccacggtggattagggatatccgaagagccaatgaggaactctgagaggccaaatcccaactctgtacctgtgcctcaccttcttcatgctgcatcagcgcccgcggccatggattcaagcggtgaacccacaccccggaggcaaccgtcaagtgaagctattcgcgccaaaaaggaatccatcgaaaagaagtggtacgagggcgccgaatcgggtgacgatgaagacgaagagcttggaaactcccaaacacgtcgcagcccaccctctcgaaatcgccgcccgggctcgaaactggggattgagatgatgcggaccaacagtcggggcagcgttgttagtggcagtgaagaactattgaagaaggagagggaggctcttcggaaccaagccgcggagtccacccataacggagacagcgatggctcttttggttctcctgccagtacaagcttagaagatcgttttgaggcccttagcatccccgaagaatcggagggtgaggagccacccagtcctcgtacgtccccgacaaggcttggagcacctgtctctcagtatcaccggccatctctagcgcatcgggatacctcgatctattctggaatctctccgaattgtacatcgaagactagcccaacattgttgagtcagggtcaaactacacccccgtcggactttccgccgaggactgtttcccatcccgctgtcctgccaattacccctgaagtcaaaatctccggcagcgcgctgacccgagacgcgggttcgggcgtggacgccaactgtagtcccaccccggacgctgaagctacgccgcgacctcttcatccttcccctaacctggatccggagcagacgcctcgtcccccggagcgacatcgatcggactcgagttttgccttcaaaagatgatcttgcgatatctttctattctgtctacatattatctgcacacctacttttgtcttctctgtaaactttcctgtgtttatctatcccggggaaaccttgtaccccgtggatacattgtcatatccactccctcacgtctcttatgtctgaatgttttctttctgaatctcggagcaaggtgttccggtctttcgttttacttggcattgtttcatttcatttcttttctttccagtctttttttttttttttttttttctcagcgagaatagtctctgtttcaacatcttgaccatgtggtggaaattccaacatcagcttgacgctgtttttcctttttcctttttgtgttttatagtttgttaggataccctgaggatcccgaaatattatcttgtaccagtaagggtacttgtcttgaagccgaagcattatttaactactagcgcttcacagccacctcccacattggcaatcggcgatgatcgctccgatcaagcgttctgattggacacaatcctgattacttgtgaagatcttagacaagacctcggttagtgagattaatattatcttgtccagagtttaccgttttgtttttctgcatccaacgtacaaagtacgtgatgatcgcaaccgtgcataagatacggagaatagctcgaacatggagagcatggactccgtaataattggtctaatagcgcaccgagcgccaagaggtcatgaaaccgcctcagtgcgtaagtcagtgcttgcgacgcatgttgtatgtacaacgtcactaaatcataggctcggatttcttttggtttggaagggcaacgtcatggttgtatcacagaacacctggatgtaaacattctatactctttactgtttactgttttcctagaatatatactgtatgttgtatgaattgtagccaccggtgtttacatgacactctacaacacacctaactaggttggaggcgtcctgggcgttcatgatcactataagcataaagccagtctaataatagtctgacaatatatattaaagttgctatctatcacagactcggtgttctccttttatgaacacaatttacactttcaagtcaaatccaagacaaaatccctttctcgccacctggtggatcggcaaaacgttggcaagccgtgatgggccacatttgtctcgaagatcattggcagttgccctgcacattgcgtatgtggaacatcttatttgactgctcccaaggttggtggttgaaatagaagttggaatggagttgttgtgtgtaaaaggtacgttggctgcgatagactgttgtatacaatgttgtataccacccctatatacatcccaacaaccccttatttgcgagtcgcgatgctctaaatgaaggcaattaaatctaaatcgagttaatttcccacaaccaatagcgtatttataaaaccgatcgagatcatcgtgaaatgtaaaagtccaggctctgcactgttatgggtcttccccatcaaactccacttggccatgtcctcttctcttccttcacactctctcgctgtgttcttttctgcctctctgctgtcttttttcttgtttgcttcggttgcgatgtcatcgagacgaaacgtataatatacattcaatatacaatcccccctcggtcactacagagtacattccagtctttcctctccgccttgacagaatttcgctcatacttggcccggtgccatcatgtcgtcccccgtggaggaacgaaaagcccatatcgaagacaaggacaagcgaaaacactcggacgtctctcctccctccaatgatggcacttatgtgaccgagcctgacgctgatcgcgacacgggtcacttgaaggtcgacactacacattatgagcatgatgatgatgggcatccgccaatgcgcaccccatccgcccgtcgggagcaggccactcgtctggaggatgatttgctggtcctgcaggccgagcgtatgacctcgcattcgaccggcgcaccagacgacgaacacgatcgcaattctatccatcgcacccgttcgcgacgctccgaagccgtcgatgagtttgatgaagctacaaatcccctgcacgaaaaggccgcaatttacaaacccccggagaatccaaacacccagtttgccgtctttgtgaagaaactccatcagtcgagtttcctcgtgcgctacttgacctacattgcccccattgtcctcattctcttgatcccgttgctggtcggcgctctcaggtttcccaatgccagtgtcggcggtgtacaattgctgtggttttcaatctggttggaaattgtctggttgactctctgggcaggacgggtgagtccaatcaatgaatcatttcccaacgagcattactgatctatttcctttcttaggtggctggcaagtgcttgcctccagctgtcggtctttttgcgagtgtctttaccaacaacgccaagaaatggcgcgacatggcgaaacagctcgagtttcacgcggcgctctttttctggtggcttggcgtggagatctctttcctgccaacgatgaaaaaccaccatgtggatggtgatacggggaccaagggatgggaaatcactcttaacaaaatcatcattgtcatcttcgtgtggactatcctgaatttcatcgaaaagatcctcatccagttgattgccatcagcttccatatgcggacctatgcggaccgcattgagatcaacaaattccagattggcagtctgtccaagctgtacgattggtctcggtccactcttactgagaaagatgaagcatttgaggagaaggacgacgaaccgagttccacgggagtcaagaacccgttgcactatgctggcctggcccaccggaaggccaagggtgccctgaacaaagttggaaaccgggttggcgatgtcgcaggcgcggtcgtcgctgacgtcactggacgcgcgacgactcgcagcaccgatgcctatcaggtcattttggcgctcctgcgaactaccggaggctgtcaggtcttggcgcgtcgtctgtatcgcacctttgtgagggatggctttgagaccgtttttggtggtgacttgaaagccgcatttgaggacggcgaggaagccgaagctgccttcgctatgtttgatcgcgacatgaatggtgatatttccatggaggagctggaggccgtttgcgttgacattggccgtgagcgcaagtccattactgcatctctcaaggatttggattcggttgtctcgaaattggacaatgtcttcatgttcttcgtgtttgtgattgtgctgattgtatttttgtcgctcatctccacctcagccgccggtgtgctcacatccgcgggctctgctattctcgcactgtcctggttgttctctgctactgcccaagagttcctccagtcagttgtcttcgtctttgtcaagcaccccttcgatgttggtgaccgtgtgaccatctacggtaacgctggagattccggtcttggtgatgattactttgtgaaggagattactcttctgtacaccgagttcaagaagatgcaaggccatgtcgtgcaggccccaaatagctacctcaatggccttttcatcctcaatcagcgccgttcgggcgcacttgccgaggcggttccaatcattatcaagtatggcaccagcatcgaccaactcgactccctgcgccagcgcctgttggagtttgtgcgtagcgagaaacgcgacttccagagcaacatcctcaccgaaatgcgtgccgtcaccgagaacttttcgctcacactcaacatcgtcttcttctacaagtccaactggcagaacgagggcctacgtttgcagcgccgcaacaagttcatatgtatgctcatggtcgccctccaggaaatcggcatcgagggcccacgcatgaacctccaaggtgccaagttcgacattccgttccacgtcaactatggcaatacacgctctgccgagcagcaagcccctatcgatgccgacccagtccccatctcagaagaatctcaccacctgccagagaataccggatccagcagcggcagcgctatccgtcacccatcgattcttcgcaagggtatgaacactgccaatgcccgtgcacgcggcccgtctgtctcacagcacaaacacgtcgacttctccttgggcatgtccaacatggcatccaacgatattatgggagatgtgtttgaggatcggggtgtggtcgtcggtgaagtcgtccggtcggccaaccgcgatgctgcagaccgccgcatccaggaagagaacgaggacgaggaggagcgcaagagccgtacatcttcttcccggcatcgtcgcccctccaacatgagcgctccctccaatcatgatgacggtcgccggtcgaccgacgctcacagcttccgtagtggccagtcatcgctcagccgtaaccggttcttccaacaccgcagcagcgtaggtcacgatcgcgatgacttgatggagcaaggccgcgtcgatgagcctactcctccgccaccggccacagtccctggtgccaaggagcacccatattgatttgagatgcggtcattttcaatatcgtgccatattcactctcccagtgaccaatttgatatcgaaaacggctgattgaacactgcccgctgtggttatcttttcccctagcctctttggttcaagcgcagtatgagacatgtgtctgcaatgaggtcggtggtgaaaccgcgacctaagttaaatctcataggttcagacatgagaaagattccagtattgaagcgaaattgcaagtggatgcattgcaaatctgtgtgaatatataaagtctacttgatcagagaaacaccacgctacactatatatattttacaaatttcaagtcgccttcactgtattctagctagaacaccaatgggggaaatatctgaaaatacaagcctttcaagagtttcatcggtatctccgagaatctgctttactgtctttgtatggcgcctttgccccgttcctgctctcctggagatctgtccattcgattgacgaagccctgaatttgatcgacaagtcgaaggacggaaaaaaagtatcaaaaaatcaaatcaaattaataagtattatgtgacttttccccttgttgtataaccaaaccttgaaccctctagtgataacgccatgatccatgcaaaattattactagtgatacaagtcgaagattcccttcaactgtcagcagcgacattgagctcttgaagaaccttcaatgtgtgctcataggtccacatcgtcaccgcacttgccggtgccgccttgagtaaactgaccgtcaagccgcggtacaaaccacgcacaccctgggtgcgaacaatcatggcaatacttcggaggacgccgttgtactcagggatatttcgatgaacgtaacgggtccttgttggaccctgtacctgcaagcgctttcgcacgaggtctagggggaaaacacccgtcttagccagtacactggccaccacaccggctgcggcatcgcctgtaccaaacggcagatcctcccaggtcatgactggtctaaccgcctcgtatgttgtgaaaaagagtcccatgtatggcacaatttgtgccacagcggcagaacacccccggaagaatcctggtgcgccctcctgccgagcgatctcaacaatcgaggcgcgaagcgagctatacacacggtccgggccctgcgcggcaaatcgcgtgcggaggaggtcaagcgggtatgtcattcccgtggcacatccgcctcccactgcaccggaaataaaggattcgacaggttgggggagtctgtaggagccaagttgggcgagggcttgggttgttcctcgatacgcggtgaattgcatcgcaccatagcagacatacatcatttcggcaggaatattgcccttccaaaggccctgtgagaacaaatcccagttagtatattgacattaatgtcgggaagcaaggtaatattttcaacgtacagtgattccctcttgcttcataatcgtccgcatagtggacaatgtccccttataaacaggcccattgacactattatgggacgcagggtctgacagcgaatggatttgcaactgcagtctgatcttcacgacgtctagcggcgcaatacagaaccgcgagatcagccctgcaatcccgccggccaatacgacctgtcgcttggtgccttcatctttgagatgttcgccaccggccgacatgagttgaaagtgctttctcttacagactagagatgtctgtatggtggttgggttaggttaagaatattgaagcatgaagacccatgttgagtcgttgagttcaccttgggaatgtttaaaaaaaaaacaacaacaacgtcaattgggcaatttacgtaagttccgggctggccctggcgaagaatgataactatgtttgcctgaggtataaatattggcctgaggtgtaatagtatgcctgaggtattaatttactgcctcaggcaggaacgcatactattgaagccgaggtaacttatagcttccctccatttgtcccgcgtgctccgcgaggtagattttgctctccctctctgccatttcactgattaccttttcttcttaactggttcacgggcccttcatgcatcgtctccgagcttcagctaccttctggcaattgccaagggccttattatactctaccccgcgccgtaacttcatagctaccccgagtaggttcaacagccccgtagagccagactctcacgacaaattggaatctctcgccccaggaattgaccatccacttcccataccacaagaccccagcaactctaagggggacgtgccagacctcacccccgaggtggtgacaagaaaaacccatgggaatggcatcctaaaagtgggcaaaaaagagtcgatctggactggaaaagaggaattgtacttgcatatggacaaatacacaacactcaaattgccatatacttacctgcgcgattcatgccagtgtgtagtgtgcaaggatcaacactcgaagcagcgctcattccgcacaagtgacattcccaaggacattgttccaagctgggttaattgggatgggaacaagctatcaatccggtgggacaaagacattggggggtcacagactgtacacgaatcaacctgggcccgtgactttctaaagaatcccattttcaacactcatgatcagcatcggagcgtgaactccaaaccgatcatgtggggacaggctaaaatggagaaaagtcaacattgggtgtcttacccggactatatcaccgataattccaaacttgccactgcgatgcaccagttgcagcgtctgggccttatttttgtgaaggatgttccagactcacgatcgatggttgaagccattgcaacacgaatgggaccactacgaaacaccttctacggatcaacattcgacgtgcgcaccgtcccagaggcaacaaatgtcgcatatacaaaccagttccttgggtttcacatggacttgatgtatatgaacgagccacccggataccaactcctccactgtctgcagaactcctgctcgggaggcgagtcactgttcgccgacacattttcggccgcgaaactcatgaaggagcaatacccaaaagagtatcaagtgctaagcgagcagcggctggggtacgagtacaggcacgaggaccacatctactacaacgaacgacccgtctttgagcatgattccgacacagacgagctgcgccatgtcaactattcgcccccctttcagtctcccctcccgaatagccatgatgctgagcatgtgaacaagctactagatgcgcttgcgaagttcacttcgattattgataatccaaatagcatctttgagctcaagcttaacccgggtgattgtgtcatctttgataacagaagaatcgttcatgcccgccgccaattcaatgccagcgtggggtctcgatggttagcaggcgcatatgtcgatacggatgctctgctatcccgctttgctgtctgtaagaatcagcatccgtatgtttggacgaaaaaggcacagaaagagttggcgggtaacaatagtggcaacaactagacaaggagtgaaatataaggaaaataaagaggtcaagagggtgggcaaagaggagagagaggcttacaacacaaaaggttgtatagtacaaaatatgaagatcgattgacccaatatctgaatcgtgcccaagagttggcatcatttccttctttccagcagttgatcgaatatacgaaagtgatgttttgttagtttgggctgttccaagttgtgggcccatgatccatgcctacatatgtacatagaatcaaacgttgtaaatttattgtattgatattcttgagacccgagtggaggtgcagtgcagtaattcaacatagtcattgcggtacaaggtaagttgaactaccggtgcaagcatctgaagaggatgtgttgaatctggcatggcccacagggatattctgtgacaatgtactggtttgattcgacgctggttattccaatttatagcaaggacgtgtcccgcaacattgcgaaggatagatatgatcagacatgcgtataagccgtatgaagacaaaaacgtttatcattatgttagactttttagcatctagccccagagacagggggtcatgggtatcgtgcaacgatcaaccaaccactcaggcagccgcggtgggtttgttaactgagtgatcattgaggaagtcggggtcgctgttgatttcctcacggacctataccatagggttaataatcgaatcaaagaagtggagtgtgacggaacacgtacaatatccaagccacccaccaattccccgttcacccacaattgagggaaagttggccactcagcgtactccttcagaccctggcgcacatcctcatcggccaagatattgaagaagccgtacttgacactacgctcgcgtagaattccaaccagctgccgactgaatccgcattgtgggctgctcggggttcctttcatgaacagcatgacagatgctgcgttgaccagttgctcaaggcgggcaaatagtgcctcccgggattgttcgggtgtcagggtgggggcagacgcgacggcggttgcattagccgcatcagcagaagggggctcagcagcggtaacaggagactgagtagcagtgaaggggccatcctcacgagcaacagcagatagcggcggaggaatgttggctttcacaccgtccatcggaccgacggcacccgcgacatttccgcggccagcgtggcgctcgacagcgtcacgaaccttgacggcatcacttccactgatcgactctaatatttggccgctgcgtaagcacacaacgaacggcacggctgaaacgtcatactcttccgagatgtcaggtagctcctcggcgttgatgctgacaaacgagatagtgggcggggtagtggcggggtactgcgaagcgagggctgagagtactgcgcccatctgcgcgcacggggctgcccatggagtatggaagtataggacaactaatgcagacggcgatagggaagaaagatgcgaggagaagtcggcctcagacgtgatttcgatgagtgtcgacatgttggatgtgtgaaagaatgagacaactggaactgatggcaaagtcgggaatcggcgatgagaggtatgcttcgaaggcaagattgagcagtcaaggcgagcctaaagtcaagaagcgaagaagacttgtcagaagaatggcgtgatggataccgaaaataagccccagatttccattcgggttatcagatcgtttggcgtctctggcgcctctggcgtgccgtgtggtgtatgtaagccggaaaagtctgcgacacatattatccgatatacacgtgatctcaatcaacagcagcacgtgaccttatcgcgtatcatcatgaatttccatgccgcgatgctgtgcggcgaggaaactgcaaatccaaagacaacatgggaaaagagaggaagagaaagcttagctcggacgacccggttggtcaaccaacagctcaggtattcggtgtcgccgatacattgtcccggttgcagagcgataacccgatcagcgaaggttcgaacggcagccatgcgtcaaaaaagcgcaaaagagtcgacggcgagaaagtcaaatacccagatctcacatacgtcgatggaaaattagtgtcacctattcgaatcgccgatctgcaggggttgcttctctattgcttcgccgatggtatcgcaccccaatggatctccgtgaagcattctggccatgtgcgcaaggtggttgtactgatggtacctggcctcgagatgggcatgtttgatgggacaattcctgtgcaacgtgcatcagtcaccggggagcaagaaacacaggagcccaagatcaatgcgccggaagccaccgaggaggtacctaaagacgaacacgctgctgattacgagagatggaagcagggcctcccattgccggatcgctcgcatcgcttcaatcctcgatctatcacacgggaaaacctccctgaaccacttcagcccctggccgatatgtttccccatatctggcctgtcaaggcgccaggcgacaacaaatacaacaaggtccattcaccactacaggcgattcttatgtcctcgccccccaagacaaaaaatgatgactcccgtgcgaagggcgcacggcccgcaaaggttgagaaaggcttcgttccgaaacgaacaccaatcacagcttttgtcacttcacgcgaggatctactggaaaatgactttatcttgcaccctgttttcttctcttccgatgaggaaaagtcttcccagatggaggctcgtcagcgaggcagtcagtcggtggaagatggatgggtggatactcaagttccaaccctggagtccgctctaccacctgatattgaaattgagagtggcagtgtgactgttggtcgagatatttttgcgcttgactgtgagatgtgtattacagagggaggtcagtccgaactcacacgcatcagcatggtcggctgggacggcgaggtggtccttgatgaactagtcaaaccagcacggccggtgatcaactatctcacacgttactccggaattaccccggagatgctcgagcccgtcaccaccacccttcgtgatatccagcaaaggctcttgactcttctcacgccgcgtgcgatactcgtaggacactcccttaattccgacctcacagcactcaaactggtccacccgttcattgtcgatactagcatcatttacccacacccacgtggtccgccactcaaatgcagcctgaaatggctcacccagaagtaccaaaacaagcagatacaaaacggaatggccgggcatgactccgttgaggacgcccgtgctgttcttgagcttgtgaagttgaagtgcgagaaaggcgagcgatggggtaccagtgattcttccaatgagagcatattccgtcgactatcacgctctactcggcctagtcatctccctcggcctggagaagaacgaacaggagctgtggttgactggggcaaccccgaacgtggctttggggctcaggcaactgtctcgattggatgcctggatgacgatgcagtcgttagcggtgtctccgcggtaatcaatggagacgagtcccatccctctattccaggaggtggtgttgactttgcctgggctcggattcgtgatcttgaatatcttcgcggttggtgcagccgcctccctgatccaaacaacgccaacgaatccacaactcttttccctcctcccgaagaaacaacgccgaccacaacctctggcaatggggactcgacagatcttccgcggcctgacgtcttggctgatactctttcccggaccgtctccaacatttcgcgaatttacgactctctcccagcttgtacgcttttcatagtctattccggtacaggtgatccacgtgaggtgggccgtttgcaatccatccacaagaagcaccgtgaggaattccggtctggcaagccatgggatgagctgacatacaaatggaccgacgttgaggagcaggctctaaagaaggcttgcgagcgtgctcgcgaaggttgcggttttatgtgtgtgaaatgatttagccgaagctacgtatgccacactccaaatgtcctacgctacgattatgattctcatttcgcttccatctctgttgtatgatcgtctacaactgctgctaagaactcgatgtgcatgtttccttacgatagaatagccaaacacccagtaggatccaggtcaaacacaaaaaaggttcctttggccactggaaaaaggggtatgtaaaactgcagaaagaggacttgatatatccgaaagtgtgaaagattgtccgagtagcttgaagtgcaacctcagaagtcataacactttcattcacgtattgtaagctactaagttgcccatccaatccgtgttctgtatatatcccgtctggaatatcgggctgtggaagtccccacaggaatttgtggggcggaggtgggagatttctcccgacagcaacggacacgaacctttcgcccttagcaatgaatcccttcaaacgggcaaccgcagcctggcatcctgttggtcttgcatccgagtttccgagcatcgatgacgatgcccggattgtgccaagatgcaaagctttcaatattcccaagacaaacgacgccatagagcgagttgaagacattgacctaccaggagaactgaaggaccaagtcctggtgttcaaatacaagggcaaataccatgccattgatcatgtaagtcaaacggtttttccaattggaagcattgagctcacccattctagcaatgcccccactcgtcgttcccactttcacaaggccacctctttgatattgaagacttcggcatcgtgctcagcgcaggtctcacatgtcccaagcatggctggtcatttgatttattctctgggcgtgctgatcgcggcaactacacactcaaggtgtgggaggtacagctgcgcgactcatcggcacttggaagtacggaccaagaggtttgggtgaggcggaaacaaagaattggttaacattggccattagcatcgtccaattttccttagtgacttatcataaaaagtgcaccaaggctgagttgaccttcctggagtgattgaatttagcaggccatttaagctactcctcgcaacttgttcatctaactatccatatcaaagtattcatatgggtagcctgtcgatccctgctttagattttggctcgaatgcgacccatcaactttgtggagctcgggtagttcacgaagtagtaattgcacgagggaagaagcttgtctccatccaggggtaaattggtctcgagtttctacccaatcacttaatccttggacagtaggccaactatctgtatattgtatgcaacattcagccccatctgtcaagcattactcatttttctggcagccaattgctgtctataaaagcaccaaaatgtcacacctagcgcctccattaggatgaatcccgccaccatctcgatgcccaacgagtcacacccagtcaataccatgccaatcaaaaggttcgcacacccgccgaccatctccattctacccacccaaatatgagcgtacgagacccatgtccgggcgcggattcggacaaaggtaacatgatgccaccagcctagcagaatctgtatgagcagaaacgccacaatcattccaccgaggaactggtgagtgttgaagatcgccgatgccttcgcggaatcggaatcatggcgcttgttgtgactgtgaccgtgctcgtgcgcttgattcaaggcgataccggtgcccgccccgactatcatacaagtagttgccagcccctgcaagatccagtggtaggtgaacgagcgtggcgagccacttcgcaaagcgaggacgccgacaggaagaagaaagaggaagctacctgccatcatgatcccgtgggtcatttgcaagagcgcggtggccttaaccttgcgccaggtgttcgctgctgtagcagcgatgccggaaatgccgatcggagtgtccgaggcgcccaaagcctcgatattgggccgcagtggtggaaatgagggatagtagtcccccggctgtgtcagagagcgggccatgtcgacgtagaaccgtacccagccaccattgcccacgtggtgtgcatacatgtctaatggtgcgtcaaagctgtacatggggaatttctgctggttgttccaggcccttatccagggttgtgaggatgacagaggcgatatgggcgacgtaggccagcgagcacaggagtagcagatcaaggacaagtgggcggactgaggcctttgacttttagcaatggtgtgttgttcatgatgcatggatggcaaggcggacatccaagaggtttggagaaggcgaagatcggctccgcccatgtcgtcgtgggtgatcaggcgaggctggtgatggccatcgacggttcggatacttagcacgggattctcactggattcgggatccccatagaggataaacatcagggagcctgccattagagacccggtgccgatggctgtccatccgagatctgagtcgcgagttattgagagactgaggtagatgtcgtgggtggtggtggaggaggagttgaagtgtgtcgaaacacccagacggaaattcaccttgtcttccttagcatcatgatggccaaattggcagtattggacgggttcagcttggcagaccttgtctacaaacagcagaaatagagggaacgaaatagaccatcaacttcatgactagacattttgatgcattctgaggagatcactgtcgccccatgcagttagtagacctctccgtgcggcattcctttccctttctctttcttcctctggcagacaacttgccggcaaacgcgcagcttggcgcgtcggcgttctctttatgtgtctgcagagatgcttctcatgtgttctggtagatggaatctggcttgctttgtggtgcgaagctatatagacaggcttcagtacagtagctagtttcgtatcttccatcaacatcaccttttgctatctggttgatcacctcttccctcgtagtcagaacctctcatcacattccttgccaaggagaaagaggatgacagtgaaaataacatattcatactagcctttattctttccgaaggaaaaaagaggtaatcttgtctttttatgcattgatgcatgggaatgaccgtgcatgagtgaccttacaggctttggtgcttggcgtaattcgtatctttcaataacgattcagaagacagacgacagatgtgagatgtgaggtgtatcagccataatctatgcaatggagtgggctctgcttttactctgggcattgctaggggaggcagttgccaacatcccacactatcagctgacaagctgtaccaagattccgcccgaatggactcggcataggcgagctcacccggacgagatggttgacgtatcaattgggctcgtccagaatcgattacctgagctcgaggagaggctcctacaaggccgacatcctgtatcctatggaataagcatatctcacacacctcttcagtctctgacccttctcatccagattatggaagacatctctcagcccaagaagttctgcacctcatacggcctgtgccagagtcgattcccaagatccaagcctggctggatgaattacaacccctgaggggccaatatcacaatatctcccgccggtgactggctggatcttgctatgcctgtctcgtgtcttgagcagctactccaaaccgaatactgggtcttcgagcagccggggtctgggattcgagcaattcgctcacacgaatggtctctacctgctgacttgatggatgtggtcgatgtgattacaccgaccaacgtttttatccacccgaccgtccaatttcgattgggcgcacctactccaatctgggaagaggaaagtcatctgccgatgtatcaagacctcatcgatgaagatctattagatcgtggcagactggagattctgacccaggaggaactatccgcgaatcccacaggcgactggtgccaccggtaaatcatcaccatatctttatgaaatctaatttgcgcaccctaagatacaatgtttggattcagataccacacctttaaccgcagtcgcaaccgtttcgcaaattgtcctcagtgcgacccacggtgccgtcagcggtgatgtgtctctctaccaacgactgaatctactaggtggtgcattagccaacatcggtgccaacaaagcctgtggtacgtgtgttatctatctccttctttttctcactccccgggtataggagctaatatttccgacagaactaatgggtgactttcgcgtgggctttcttctgcaaaccccaccacggctccaatactttgctcaactcatcggaacactattcgccacaattgtcgccccggtcatcttcaaactcttcactaccgcttacccatgtatcattgctgagggcgcaaatggtaacagtaccgatgccgccgccgctcaaggccgccgctgtgaattcagcggaccctccatcgcgacatggcgcgcggtggctgtcgcaacaacctctggagcctctgggcagtcggctattccagaagcgagcgggcgattcgctgtgttgttcgcagccgtcggcgtgatgattgtgttactgcggaatatgctaagagctttcccagctaaggtatatttgcctaatatgatgatgatggggttggcttttacgatgccttcgccgccgtatggaattgcgatgttgatgggggcactgggggcacgcatgtggaagtggagggaggagaggacgtttgagacgtattcgtcatcagtggcagcggggttagtggctggggaggggattgggggtatagtgaatggagttctgacgattgcggtgggctggggaggagatggctgaggtactggtttgggatgtcccagtggccggggttagcgaattagttatgcttacgcatatctagaactttcataaagtagttttgtcactggttttagtcaatgcgtttctgcacacggctttgatttcaaataaaatttactagatgataagttgacaacgcagagaagtagttacacaggtacccaaactaccaagaccatatagaccatctcaataaatactctcatgaggagcttctgtattgtagttataagccagggactaccgtggacggtttgttgaccgaaataaatgaaaccactactcctagacggctgtatgtattgacatttatatctcttgaggcccttaacgagattaaaccatccagccaagcagaccgcaactctagcaaaagcaagccatagaatattggaacactttggcagacacagaagtaagtactctctttcgcctgtaactattgtcaatctggatcattcttctagaatgtcaagccagccatgcttcctcatacccctgcgtacatttgactttccagggttgacttttgagtctggctgatttgtgtgttaggattctatatattctaaggtagtatgtgggattgaaaactgaccatttatttgtccgcggtgtaagcggtggcagcatcggcatcccagcggcgatagacgggctcggccacctcagagcgcttgtcggcggtgtatgcagtggcaacatcagcaccagagcgcttcttgtcggcagtatatgcagtcgccgcgtcggtatcccaacgtttatcagcggtgtatgcggtggcagcatccgcatcccagcgcttgtcggcagtgtaagcggtggcggcgtcggcgtcggtcctagacttcaagccaacgggggatgcattgacgagggttacggcaaggaccaacgcctgggtgagcgcaataagcgtcattctgaatgataagcctcaaaaatagaattagatgagtcgagtggagatatcttgacagatgatagatactgttatttgcccgatgaagctccctcttaggtgcgagcgaggagatacttatatacaaactagagcacaagtatggatgctgaataaaggctccacagactcattcgaatattcagttcatcttgtcacagccagtatcctattacgccatggcaggggattctgcacggtcatcagatgtcttggatgtacacgacattcttgttaccccctttggcacaggatcatcgactgaccatgcaggacgatggcttcagcgcatgaagagcccactccaacccctccttcccctcacctatgatgagaaatgacctttttcattattagccactttgagacataattgcacattgtgcacttctcgaagatcatctcgcctccatatacctgcaaccactctcaattccacattcggcccccctgaatacctagacaatatggacgcagaggacctgaagaaagaacatcgaaatagtatgtcgcccacgcagccaatcctcgacattagttacaatgaccgagagcctggccaccacgaagtggaatcccaacaacactcaccatatcgccccgcctcctgggcacggagagccctggtgatgcatggattgataatcctcttctatatcggccttgccgtttcgtcgtggacaaatattctattgggggaatgtcctggtcggagttcaatctaaattgtttagtgagtgcctaatccatggtgaagggttgtcagagaaccggaagtgtctaatagcaaccaattttagcacctgtccatgagcacatcaatatcgaagtcacagtcatttacgacaagcccagcgatatcaaggctagttcatatgtgggagagcctagtctagtggttgatgaggcctggtatcgactcttgcgtcgtaagtcatcctggtacactttatattgagattgtccaacgtattttcttctagatcacaacatacgcattatggaagatgagctgcaagcaatgaaccaaacctctattcccctccgtcatgggggtggatatcaaggaatgatggccgtcttccacgaactacattgcttggtatgttctttctttcccattgtacattcacaattgactgagcacgtcggatacagaaactcgttcgtgaagccgtccatgccgactactattacgcagaaaaatcccatgccgagagagccatgttgattggccatacaggtcagttttattctagcttcttccgttacctgcattcacctccctgaaaaataaccgttaaaactgggatcaaagcattgcatcgaaattcttcgctcggcatccatgtgccgcgctgataccgccatctttccataccactggaacgacgccacgcggcttcccaatcccacatgggtgcagaagcatgaatgtgtgaactgggcctctctggaggaatggttggagagtcgacggattgatatattcgcccctaacatgcgggtgcatccgaagtatggtgaattttgagtttgcgttattacaccaggcaattcgttggctaactgcataaaaccgtacataggccccgcatatccaggagggaagcggatttccgagccagttggaccgaaagtctatcctttagatgaatgatggagaatcggttaaatttctggtcaaacaaaatcagattcgttcatatagcctgtaagatgattgaaactaatgatattcagttcaagacttacgaaattccagctctaggtgtgaaaattgttaagcatgtgtaatgtttcttgcaagcctaaaccaaatgagccattgtggatgatcttgaagcctcgacctttcttttctcattagaaagtggtattgttagtaaggtagagatgatgttctggctgttcagtgaaagtacatcataccgtgtactgtaaactgaagccattcctaccccatagatcatcagtttcttcgaattctgcgcgttaagaaccgaatctgaccgcaaaacgggtgcatacggaaattagcatagtgggaatggcttcattcttttagcagagagatttgcacggaatagcttcattttttgaatttggataccatgcttactaaagccactgttatggtaattcaggctcgcacatcacgtcctgatcgtcttcggcagtagttttttcggtagcttaaagcacttccgaattcatggcagtaaacacccaccgggttttagagctttatatgtttgcgcagttattcaggccacaggtgtgcttcgattattgtttcaattacttcgcatccctggaatcagaaatatcaattagcaaataatagagtatatttccatacatgtacttgatgtaacccacattaatttgagttagtcaaattcccatcgaacgtgattacttcccaggatggtggcctgctagatgcccatgctgatcaaccgccccgatcttgtcgccctcaccatttggatacgcaactctctatataggaaatcatagagcctaagtacatataaaataatgagtatttactattattttagtatcactagaaagcccttttcttaagcattctagatcatatcttatctttcgtatccagctagtgtagcgtctgaaattcgtggttaaagttaaggtatatctttgaggtttagggctacgggaagaatgacactaacctaattcggccatattttgtacgcaccataactacctcttaactgtattttaaccctttgaaattttgagtacttatagtagggaccttaaatttgtgcatccaatttactannnnnnnnnnnnnnnnnnnnnnnnnnnnnnnnnnnnnnnnnnnnnnnnnnnnnnnnnnnnnnnnnnnnnnnnnnnnnnnnnnnnnnnnnnnnnnnnnnnnnnnnnnnnnnnnnnnnnnnnnnnnnnnnnnnnnnnnnnnnnnnnnnnnnnnnnnnnnnnnnnnnnnnnnnnnnnnnnnnnnnnnnnnnnnnnnnnnnnnnnnnnnnnnnnnnnnnnnnnnnnnnnnnnnnnnnnnnnnnnnnnnnnnnnnnnnnnnnnnnnnnnnnnnnnnnnnnnnnnnnnnnnnnnnnnnnnnnnnnnnnnnnnnnnnnnnnnnnnnnnnnnnnnnnnnnnnnnnnnnnnnnnnnnnnnnnnnnnnnnnnnnnnnnnnnnnnnnnnnnnnnnnnnnnnnnnnnnnnnnnnnnnnnnnnnnnnnnnnnnnnnnnnnnnnnnnnnnnnnnnnnnnnnnnnnnnnnnnnnnnnnnnnnnnnnnnnnnnnnnnnnnnnnnnnnnnnnnnnnnnnnnnnnnnnnnnnnnnnnnnnnnnnnnnnnnnnnnnnnnnnnnnnnnnnnnnnnnnnnnnnnnnnnnnnnnnnnnnnnnnnnnnnnnnnnnnnnnnnnnnnnnnnnnnnnnnnnnnnnnnnnnnnnnnnnnnnnnnnnnnnnnnnnnnnnnnnnnnnnnnnnnnnnnnnnnnnnnnnnnnnnnnnnnnnnnnnnnnnnnnnnnnnnnnnnnnnnnnnnnnnnnnnnnnnnnnnnnnnnnnnnnnnnnnnnnnnnnnnnnnnnnnnnnnnnnnnnnnnnnnnnnnnnnnnnnnnnnnnnnnnnnnnnnnnnnnnnnnnnnnnnnnnnnnnnnnnnnnnnnnnnnnnnnnnnnnnnnnnnnnnnnnnnnnnnnnnnnnnnnnnnnnnnnnnnnnnnnnnnnnnnnnnnnnnnnnnnnnnnnnnnnnnnnnnnnnnnnnnnnnnnnnnnnnnnnnnnnnnnnnnnnnnnnnnnnnnnnnnnnnnnnnnnnnnnnnnnnnnnnnnnnnnnnnnnnnnnnnnnnnnnnnnnnnnnnnnnnnnnnnnnnnnnnnnnnnnnnnnnnnnnnnnnnnnnnnnnnnnnnnnnnnnnnnnnnnnnnnnnnnnnnnnnnnnnnnnnnnnnnnnnnnnnnnnnnnnnnnnnnnnnnnnnnnnnnnnnnnnnnnnnnnnnnnnnnnnnnnnnnnnnnnnnnnnnnnnnnnnnnnnnnnnnnnnnnnnnnnnnnnnnnnnnnnnnnnnnnnnnnnnnnnnnnnnnnnnnnnnnnnnnnnnnnnnnnnnnnnnnnnnnnnnnnnnnnnnnnnnnnnnnnnnnnnnnnnnnnnnnnnnnnnnnnnnnnnnnnnnnnnnnnnnnnnnnnnnnnnnnnnnnnnnnnnnnnnnnnnnnnnnnnnnnnnnnnnnnnnnnnnnnnnnnnnnnnnnnnnnnnnnnnnnnnnnnnnnnnnnnnnnnnnnnnnnnnnnnnnnnnnnnnnnnnnnnnnnnnnnnnnnnnnnnnnnnnnnnnnnnnnnnnnnnnnnnnnnnnnnnnnnnnnnnnnnnnnnnnnnnnnnnnnnnnnnnnnnnnnnnnnnnnnnnnnnnnnnnnnnnnnnnnnnnnnnnnnnnnnnnnnnnnnnnnnnnnnnnnnnnnnnnnnnnnnnnnnnnnnnnnnnnnnnnnnnnnnnnnnnnnnnnnnnnnnnnnnnnnnnnnnnnnnnnnnnnnnnnnnnnnnnnnnnnnnnnnnnnnnnnnnnnnnnnnnnnnnnnnnnnnnnnnnnnnnnnnnnnnnnnnnnnnnnnnnnnnnnnnnnnnnnnnnnnnnnnnnnnnnnnnnnnnnnnnnnnnnnnnnnnnnnnnnnnnnnnnnnnnnnnnnnnnnnnnnnnnnnnnnnnnnnnnnnnnnnnnnnnnnnnnnnnnnnnnnnnnnnnnnnnnnnnnnnnnnnnnnnagtcaattgtctgagttaatactctgagttaatcctctgagttaattatctgagttaatactctgagttaatactccgagttaatattctgagttaattatctcagttaatcctctgagttgatcctctaaattaattctctaagttaaacctctgagttgatcttcctagtttatattccgatttaattctctgagttaatactctgagttaatactctgagttaatac
